(19) United States
(12) Patent Application Publication
(10) Pub. No.: US 2022/0243263 A1
(43) Pub. Date: Aug. 4, 2022

(54) MARKERS FOR IDENTIFYING AND QUANTIFYING OF NUCLEIC ACID SEQUENCE MUTATION, EXPRESSION, SPLICE VARIANT, TRANSLOCATION, COPY NUMBER, OR METHYLATION CHANGES

(71) Applicant: CORNELL UNIVERSITY, Ithaca, NY (US)

(72) Inventors: Francis BARANY, New York, NY (US); Manny D. BACOLOD, New York, NY (US); Jianmin HUANG, New York, NY (US); Aashiq H. MIRZA, New York, NY (US); Philip B. FEINBERG, New York, NY (US); Sarah F. GIARDINA, New York, NY (US)

(21) Appl. No.: 17/608,537

(22) PCT Filed: May 1, 2020
(86) PCT No.: PCT/US20/31044

§ 371 Date: Nov. 3, 2021

Related U.S. Application Data
(60) Provisional application No. 62/843,032, filed on May 3, 2019.

(51) Int. Cl. C12Q 1/6858; C12Q 1/6886

(52) U.S. Cl. CPC C12Q 1/6858; C12Q 1/6886; C12Q 2600/178; C12Q 2600/156; C12Q 2600/158; C12Q 2600/154

(57) ABSTRACT

The present invention relates to methods for identifying and/or quantifying low abundance, nucleotide base mutations, insertions, deletions, translocations, splice variants, miRNA variants, alternative transcripts, alternative start sites, alternative coding sequences, alternative non-coding sequences, alternative splicings, exon insertions, exon deletions, intron insertions, or other rearrangement at the genome level and/or methylated nucleotide bases.

[0001] This application claims benefit of U.S. Provisional Patent Application Ser. No. 62/843,032, filed May 3, 2019, which is hereby incorporated by reference in its entirety.

[0002] This invention was made with government support under grant number P41 EB020594 awarded by National Institutes of Health. The government has certain rights in the invention.

### FIELD

[0003] The present application relates to methods and markers for identifying and quantifying nucleic acid sequence, mutation, expression, splice variant, translocation, copy number, and/or methylation changes using combinations of bisulfite treatment, nuclease, ligation, and polymerase reactions with carryover prevention.

### BACKGROUND

[0004] Cancer is the leading cause of death in developed countries and the second leading cause of death in developing countries. Cancer kills 580,000 patients annually in the US, 1.3 million in Europe, and 2.8 million in China (Siegel et al., “Cancer Statistics, 2016,” CA Cancer J. Clin. 66(1):7-30 (2016)). Cancer is now the biggest cause of mortality worldwide, with an estimated 8.2 million deaths from cancer in 2012 (Torre et al., “Global Cancer Statistics, 2012,” CA Cancer J. Clin. 65(2):87-108 (2015)). Cancer cases worldwide are forecast to rise by 75% and reach close to 25 million over the next two decades. The lifetime risk of a woman dying from an invasive cancer is 19%, for a man it is 23%. With total annual costs of cancer care in the U.S. exceeding $400 billion, there is no other medical issue that so urgently needs intelligent solutions.

[0005] In the U.S., new cancer cases among men are dominated by prostate (21%), lung (14%), colorectal (8%), urinary bladder (7%), melanoma (6%), non-Hodgkin lymphoma (5%), renal (5%), head and neck (4%), leukemia (4%), and liver and bile cancer (3%). Among women, most of the newly diagnosed cancers are breast (29%), lung (13%), colorectal (8%), uterine corpus (7%), thyroid (6%), non-Hodgkin lymphoma (4%), melanoma (3%), leukemia (3%), pancreatic (3%), and renal cancer (3%). The leading causes of cancer deaths are lung cancer (27%), prostate cancer (8%), colorectal cancer (8%), and lung cancer (26%), breast cancer (14%), colorectal cancer (8%), for men and women, respectively. These cancers are driven by different biological processes, and while there have been exciting advancements in the treatment of some cancers, such as the emergence of targeted therapeutics and immunotherapy, most cancers are found at later stage, where survival is poor. Due to lack of reliable and inexpensive early detection tests, many cancer types are diagnosed at later stages, where survival rates for some cancers drop to below 10%. The current screening technologies are failing due to low patient compliance, high expense, and low sensitivity and specificity rates (Das et al., “Predictive and Prognostic Biomarkers in Colorectal Cancer: A Systematic Review of Recent Advances and Challenges,” Biomedicine & Pharmacotherapy 87:8-19 (2016)). For example, the high cost, discomfort, and invasiveness of colonoscopy are significant impediments to patient compliance for CRC screening (Beydoun et al., “Predictors of Colorectal Cancer Screening Behaviors Among Average-risk Older Adults in the United States,” Cancer Causes & Control: CCC 19(4):339-359 (2008)). Likewise, patient distaste for handling feces has limited the success of FOBT/FIT, and eliminated stool-based tests as a remedy for low compliance. In contrast, the current proposal addresses these problems by developing a blood test with the potential to become widely adopted. Increasing patient compliance for CRC testing will lead to earlier detection and, ultimately, increased patient survival.

[0006] Ultimately, there is an urgent need to develop non-invasive, highly sensitive, highly specific, and cost-effective tests which will detect early-stage cancers. Two relatively recent developments in cancer research serve as the guiding principles for these tasks. First, is the use of modern genomic tools (such as genome-wide sequencing, transcriptional, and methylation profiling). Public accessibility to vast databases generated from these studies has accelerated the discovery of a wider list of molecular markers (such as promoter methylation, mutation, copy number, or expression levels of mRNA, microRNA, non-coding RNA (ncRNA), and long non-coding RNA (lncRNA) associated with cancer progression. Second is the discovery that nucleic acids can be released by the cancer cells into the patient's bloodstream. Cancer cells may undergo apoptosis (triggered cell death), which releases cell free DNA (cfDNA) into the patients' blood (Salvi et al., “Cell-free DNA as a Diagnostic Marker for Cancer: Current Insights,” OncoTargets and Therapy 9:6549-6559 (2016)). The levels of cfDNA in serum from patients with cancer vary from vanishingly small to high, but do not correlate with cancer stage (Perlin et al., “Serum DNA Levels in Patients With Malignant Disease,” American Journal of Clinical Pathology 58(5):601-602 (1972); Leon et al., “Free DNA in the Serum of Cancer Patients and the Effect of Therapy,” Cancer Res. 37(3):646-650 (1977)). Moreover, exosomes (lipid vesicles ranging from 30 to 100 nm), which are released into the blood by cancer cells, can contain the same RNA molecules which serve as transcriptional signatures of the tumors. Exosomes, or tumor associated vesicles, shield mRNA, lncRNA, ncRNA, and even mutant tumor DNA from exogenous nucleases, and, as such, the markers are in a protected state. Other protected states include, but are not limited to, DNA, RNA, and proteins within circulating tumor cells (CTCs), within other non-cellular membrane containing vesicles or particles, within nucleosomes, or within Argonaute or other protein complexes. cfDNA in particular, contains the same molecular aberrations as the solid tumors, such as mutations hyper/hypo methylation, copy number changes, or chromosomal rearrangements (Ignatiadis et al., “Circulating Tumor Cells and Circulating Tumor DNA for Precision Medicine: Dream or Reality?” Ann. Oncol. 25(12):2304-2313 (2014)).

[0007] Tumor-specific CpG methylations have been detected in the plasma from patients with a variety of solid tumors (Pratt V M, “Are We Ready for a Blood-Based Test to Detect Colon Cancer?” Clinical Chemistry 60(9):1141-1142 (2014); Warton et al., “Methylation of Cell-free Circulating DNA in the Diagnosis of Cancer,” Frontiers in Molecular Biosciences 2:13 (2015)), through various techniques involving bisulfite conversion of unmethylated cytosines, methylation-sensitive enzymes, or immunoprecipitation of 5-methylcytosines (Jorda et al., “Methods for DNA methylation analysis and applications in colon cancer,” Mutat. Res. 693(1-2):84-93 (2010)). Methylation signatures have better specificity towards a particular cancer type likely because methylation patterns are highly tissue specific (Issa J P, “DNA Methylation as a Therapeutic Target in Cancer,” Clin. Cancer Res. 13(6):1634-1637 (2007)). The best studied blood-based methylation markers for CRC detection are located in the promoter region of the SEPT9 gene (Church et al., “Prospective Evaluation of Methylated SEPT9 in Plasma for Detection of Asymptomatic Colorectal Cancer,” Gut 63(2):317-325 (2014); Lofton-Day et al., “DNA Methylation Biomarkers for Blood-Based Colorectal Cancer Screening,” Clinical Chemistry 54(2):414-423 (2008); Potter et al., “Validation of a Real-time PCR-based Qualitative Assay for the Detection of Methylated SEPT9 DNA in Human Plasma,” Clinical Chemistry 60(9):1183-1191 (2014); Ravegnini et al., “Simultaneous Analysis of SEPT9 Promoter Methylation Status, Micronuclei Frequency, and Folate-Related Gene Polymorphisms: The Potential for a Novel Blood-Based Colorectal Cancer Biomarker,” International Journal of Molecular Sciences 16(12):28486-28497 (2015); Toth et al., “Detection of Methylated SEPT9 in Plasma is a Reliable Screening Method for Both Left- and Right-sided Colon Cancers,” PloS One 7(9):e46000 (2002); Toth et al., “Detection of Methylated Septin 9 in Tissue and Plasma of Colorectal Patients with Neoplasia and the Relationship to the Amount of Circulating Cell-Free DNA,” PloS One 9(12):e115415 (2014); Warren et al., “Septin 9 Methylated DNA is a Sensitive and Specific Blood Test for Colorectal Cancer,” BMC Medicine 9:133 (2011)), and other potential markers for CRC diagnostics include CpG sites on promoter regions of THBD (Lange et al., “Genome-scale Discovery of DNA-methylation Biomarkers for Blood-Based Detection of Colorectal Cancer,” PloS One 7(11):e50266 (2012)), C9orf50 (Lange et al., “Genome-scale Discovery of DNA-methylation Biomarkers for Blood-Based Detection of Colorectal Cancer,” PloS One 7(11):e50266 (2012)), ZNF154 (Margolin et al., “Robust Detection of DNA Hypermethylation of ZNF154 as a Pan-Cancer Locus with in Silico Modeling for Blood-Based Diagnostic Development,” The Journal of Molecular Diagnostics 18(2):283-298 (2016)), and AGBL4, FLI1 and TWIST1 (Lin et al., “Clinical Relevance of Plasma DNA Methylation in Colorectal Cancer Patients Identified by Using a Genome-Wide High-Resolution Array,” Ann. Surg. Oncol. 22 Suppl 3:S1419-1427 (2015)). In breast cancer, methylation at promoter regions of tumor suppressor genes (including ATM, BRCA1, RASSF1, APC, and RARβ) has been detected in patients' cfDNAs (Tang et al., “Blood-based DNA Methylation as Biomarker for Breast Cancer: a Systematic Review,” Clinical Epigenetics 8:115 (2016)). A caveat for using methylation markers is that bisulfite conversion tends to destroy DNA, and thus decreases the overall signal that can be detected. Methylation detection techniques may also lead to false-positive signals due to incomplete conversion of unmethylated cytosines. As described herein, an extensive bioinformatics analysis of public databases has been performed to identify CRC-specific, and tissues-specific methylation markers suitable for detection of cancer in the plasma. The methylation marker detection assays enable a higher level of multiplexing with single-molecule detection capabilities, which are predicted to allow for higher sensitivity and specificity across a broad spectrum of cancers.

[0008] The challenge to develop reliable diagnostic and screening tests is to distinguish those markers emanating from the tumor that are indicative of disease (e.g., early cancer) vs. presence of the same markers emanating from normal tissue (which would lead to a false-positive signal). There is also a need to balance the number of markers examined and the cost of the test, with the specificity and sensitivity of the assay. Comprehensive molecular profiling (mRNA, methylation, copy number, miRNA, mutations) of thousands of tumors by The Cancer Genome Atlas Consortium (TCGA), has revealed that colorectal tumors are as different from each other as they are from breast, prostrate, or other epithelial cancers (TCGA “Comprehensive Molecular Characterization of Human Colon and Rectal Cancer Nature 487:330-337 (2014)). Further, those few markers they share in common are also present in multiple cancer types, hindering the ability to pinpoint the tissue of origin. BRAF mutations frequently occur in melanoma (42%) and thyroid cancer (41%), while KRAS is also highly mutated in pancreatic (55%) and lung (16%) cancers (Forbes et al., “COSMIC: Exploring the World's Knowledge of Somatic Mutations in Human Cancer,” Nucleic Acids Res. 43(Database issue):D805-811 (2015)). In general, CRC mutation markers such as those of KRAS and BRAF are found in late-stage primary cancers and metastases (Spindler et al., “Circulating free DNA as Biomarker and Source for Mutation Detection in Metastatic Colorectal Cancer,” PloS One 10(4):e0108247 (2015); Gonzalez-Cao et al., “BRAF Mutation Analysis in Circulating Free Tumor DNA of Melanoma Patients Treated with BRAF Inhibitors,” Melanoma Res. 25(6):486-495 (2015); Sakai et al., “Extended RAS and BRAF Mutation Analysis Using Next-Generation Sequencing,” PloS One 10(5):e0121891 (2015)). For early cancer detection, the nucleic acid assay should serve primarily as a screening tool, requiring the availability of secondary diagnostic follow-up (e.g., colonoscopy for colorectal cancer).

[0009] Compounding the biological problem is the need to reliably quantify mutation, CpG methylation, or DNA or RNA copy number from either a very small number of initial cells (i.e. from CTCs), or when the cancer signal is from cell-free DNA (cfDNA) in the blood and diluted by an excess of nucleic acid arising from normal cells, or inadvertently released from normal blood cells during sample processing (Mateo et al., “The Promise of Circulating Tumor Cell Analysis in Cancer Management,” Genome Biol. 15:448 (2014); Haque et al., “Challenges in Using ctDNA to Achieve Early Detection of Cancer,” BioRxiv. 237578 (2017)).

[0010] Some cancer IVD companies have developed commercially available methylation detection tests. The aforementioned SEPT9 methylation is the basis for Epi proColon test, a CRC-detection assay by Epigenomics (Lofton-Day et al., “DNA Methylation Biomarkers for Blood-based Colorectal Cancer Screening,” Clinical Chemistry 54(2):414-423 (2008)). While initial results on smaller sample sets showed promise, large-scale studies with 1,544 plasma samples showed a sensitivity of 64% for stage I-III CRC, and a specificity of 78%-82%, effectively sending 180 to 220 out of 1,000 individuals to unnecessary colonoscopies (Potter et al., “Validation of a Real-time PCR-based Qualitative Assay for the Detection of Methylated SEPT9 DNA in Human Plasma,” Clinical Chemistry 60(9):1183-1191 (2014)). Clinical Genomics is currently developing blood based CRC detection test based on the methylation of the BCAT1 and IKZF1 genes (Pedersen et al., “Evaluation of an Assay for Methylated BCAT1 and IKZF1 in Pasma for Detection of Colorectal Neoplasia,” BMC Cancer 15:654 (2015)]. Large-scale studies using 2,105 plasma samples of this two-marker test showed an overall sensitivity of 66%, with 38% for stage I CRC, and an impressive specificity of 94% (Young et al, “A Cross-sectional Study Comparing a Blood Test for Methylated BCAT1 and IKZF1 Tumor-derived DNA with CEA for Detection of Recurrent Colorectal Cancer,” Cancer Medicine 5(10): 2763-2772 (2016)). Exact Sciences and collaborators have slightly improved the sensitivity of CRC fecal tests (Bosch et al., “Analytical Sensitivity and Stability of DNA Methylation Testing in Stool Samples for Colorectal Cancer Detection,” Cell Oncol. (Dordr) 35(4):309-315 (2012); Hong et al., “DNA Methylation Biomarkers of Stool and Blood for Early Detection of Colon Cancer,” Genet. Test. Mol. Biomarkers 17(5):401-406 (2013); Imperiale et al., “Multitarget Stool DNA Testing for Colorectal-Cancer Screening,” N. Engl. J. Med. 370(14):1287-1297 (2014); Xiao et al., “Validation of Methylation-Sensitive High-Resolution Melting (MS-HRM) for the Detection of Stool DNA Methylation in Colorectal Neoplasms,” Clin. Chim. Acta 431:154-163 (2014); Yang et al., “Diagnostic Value of Stool DNA Testing for Multiple Markers of Colorectal Cancer and Advanced Adenoma: a Meta-Analysis,” Can. J. Gastroenterol. 27(8):467-475 (2013)), by adding K-ras mutation as well as BMP3 and NDRG4 methylation markers (Lidgard et al., “Clinical Performance of an Automated Stool DNA Assay for Detection of Colorectal Neoplasia,” Clin. Gastroenterol. Hepatol. 11(10):1313-1318 (2013)). Large-scale studies on 12,500 stool samples claims 93% sensitivity, yet specificity is still only 85%, essentially sending 150 out of 1,000 individuals to unnecessary colonoscopies. Despite logistical issues in handling feces, Exact Sciences recently sold their millionth test. The Cologuard website states the test result has both false-positives and false-negatives, and the test should not be used if the patient has hemorrhoids, menstrual period, or blood in the stool. The Cologuard website also warns that the test is not for use by patients with Ulcerative Colitis (UC), Crohn's disease (CD), Inflammatory Bowel Disease (IBD), or with a family history of cancer. In other words, Exact Sciences excludes the very patients who would most benefit from an accurate CRC detection test. More recently, Laboratory for Advanced Medicine (based in Irvine, Calif. with ties to various Chinese academic institutions) demonstrated the potential of interrogating the methylation status of a single CpG site (cg10673833) for blood-based detection of colorectal cancer (Luo et al., “Circulating Tumor DNA Methylation Profiles Enable Early Diagnosis, Prognosis Prediction, and Screening for Colorectal Cancer,” Science Translational Medicine 12:(524) (2020)).

### A Continuum of Diagnostic Needs Will Require a Continuum of Diagnostic Tests.

[0011] The majority of current molecular diagnostics efforts in cancer have centered on: (i) prognostic and predictive genomics, e.g., identifying inherited mutations in cancer predisposition genes, such as BrCA1, BrCA2, (Ford et al., Am. J. Hum. Genet. 62:676-689 (1998)) (ii) individualized treatment, e.g., mutations in the EGFR gene guiding personalized medicine (Sequist and Lynch, Ann. Rev. Med, 59:429-442 (2008)), and (iii) recurrence monitoring, e.g., detecting emerging KRAS mutations in patients developing resistance to drug treatments (Hiley et al., Genome Biol. 15: 453 (2014); Amado et al., J. Clin. Oncol. 26:1626-1634 (2008)). Yet, this misses major opportunities in the cancer molecular diagnostics continuum: (i) more frequent screening of those with a family history, (ii) screening for detection of early disease, and (iii) monitoring treatment efficacy. To address these three unmet needs, a new metric for blood-based detection termed “cancer marker load”, analogous to viral load is herein proposed.

[0012] DNA sequencing provides the ultimate ability to distinguish all nucleic acid changes associated with disease. However, the process still requires multiple up-front sample and template preparation, and consequently, DNA sequencing is not always cost-effective. DNA microarrays can provide substantial information about multiple sequence variants, such as SNPs or different RNA expression levels, and are less costly then sequencing; however, they are less suited for obtaining highly quantitative results, nor for detecting low abundance mutations. On the other end of the spectrum is the TaqMan™ reaction, which provides real-time quantification of a known gene, but is less suitable for distinguishing multiple sequence variants or low abundance mutations.

[0013] NGS requires substantial up-front sample preparation to polish ends and append linkers, and the current error rates of 0.7% are too high to identify 2-3 molecules of mutant sequence in a 10,000-fold excess of wild-tye molecules. “Deep sequencing” protocols have been developed to overcome this deficiency by appending unique molecular identifiers to both strands of an individual fragment. These approaches are known as: Tam-Seq & CAPP-Seq (Roche), Circle-Seq (Guardant Health), Safe-SeqS (Personal Genome Diagnostics), ThruPlex (Rubicon Genomics), NEBNext (New England Biolabs), QIAseq (Qiagen), Oncomine (ThermoFisher), Duplex Barcoding (Schmitt), SMRT (Pacific Biosciences), SiMSen-Seq (Stahlberg), and smMIP (Shendure). However, these methods require a 30 to 100-fold depth per mutant strand to verify each mutation and distinguish from other types of sequencing errors. Recent work from MSKCC demonstrates that 60,000-fold coverage is required to accurately identify mutations in plasma from metastatic cancer patients (91% sensitivity, 508-gene panel, 60,000×). Compounding the challenge, a recent paper from NEB has called into question the quality of the most widely used databases for rare variant and somatic mutations (Chen et al., “DNA Damage is a Pervasive Cause of Sequencing Errors, Directly Confounding Variant Identification,” Science 355(6326):752-756 (2017)).

[0014] It is critical to match each unmet diagnostic need with the appropriate diagnostic test—one that combines the divergent goals of achieving both high sensitivity (i.e., low false-negatives) and high specificity (i.e., low false-positives) at a low cost. For example, direct sequencing of EGFR exons from a tumor biopsy to determine treatment for non-small cell lung cancer (NSCLC) is significantly more accurate and cost effective than designing TaqMan™ probes for the over 180 known mutations whose drug response is already catalogued (Jia et al., Genome Res. 23:1434-1445 (2013)). The most sensitive technique for detecting point mutations, such as “BEAMing” (Dressman et al., Proc. Natl. Acad. Sci. USA 100: 8817-8822 (2003)), rely on prior knowledge of which mutations to look for, and thus are best suited for monitoring for disease recurrence, rather than for early detection. Likewise, to monitor blood levels of Bcr-Abl translocations when treating CML patients with Gleevec (Jabbour et al., Cancer 112: 2112-2118 (2008)), a simple quantitative reverse-transcription PCR assay is far preferable to sequencing the entire genomic DNA in 1 ml of blood (9 million cells×3 GB=27 million Gb of raw data).

[0015] Sequencing 2.1 Gb each of cell-free DNA (cfDNA) isolated from NSCLC patients was used to provide 10,000-fold coverage on 125 kb of targeted DNA (Kandoth et al., Nature 502: 333-339 (2013)). This approach correctly identified mutations present in matched tumors, although only 50% of stage 1 tumors were covered. The approach has promise for NSCLC, where samples average 5 to 20 mutations/Mb, however targeted NGS would not be cost effective for other cancers such as breast and ovarian, that average less than 1 to 2 mutations per Mb. Current up-front ligation, amplification, and/or capture steps required for highly accurate targeted deep sequencing are still more complex than multiplexed PCR-TaqMan™ or PCR-LDR assays.

[0016] Deep sequencing of cfDNAs for 58 cancer-related genes at 30,000-fold coverage is capable of detecting Stage 1 or 2 cancer at moderately high sensitivity but missed 29% of CRC, 41% of breast, 41% of lung, and 32% of ovarian cancer, respectively (Phallen et al., “Direct Detection of Early-stage Cancers Using Circulating Tumor DNA,” Science Translational Medicine 9(403) (2017)). An alternative strategy relied on targeted sequencing of an average of 30 bases in 61 segments to interrogate “hot-spot” mutations in 16 genes including TP53, KRAS, APC, PIK3CA, PTEN, missed more early cancers (Cohen et al., “Detection and Localization of Surgically Resectable Cancers with a Multi-analyte Blood Test,” Science (2018). To extend the sensitivity of mutation sequencing, the Hopkins team very recently combined NGS with quantitation of serum protein markers (such as CA-125, CA19-9, CEA, HGF, Myeloperoxidase, OPN, Prolactin, TIMP-1) and improved detection of five cancer types (ovary, liver, stomach, pancreas, and esophagus) at sensitivities ranging from 69% to 98% (Cohen et al. “Detection and Localization of Surgically Resectable Cancers with a Multi-analyte Blood Test,” Science (2018). One caveat of using these protein markers is that prior large-scale studies with age-matched controls (n=22,000) have not shown clinical utility (Jacobs et al., “Prevalence Screening for Ovarian Cancer in Postmenopausal Women by CA 125 Measurement and Ultrasonography,” BMJ 306(6884). 1030-1034 (1993)). Thus, in a 2018 JAMA report, “The USPSTF recommends against [CA-125] screening for ovarian cancer in asymptomatic women. This recommendation applies to asymptomatic women who are not known to have a high-risk hereditary cancer syndrome” (USPSTF et al., “Screening for Ovarian Cancer: US Preventive Services Task Force Recommendation Statement” JAMA 319(6):588-594 (2018)). Another caveat of using these protein markers is that they reflect tissue damage and are likely to also appear in patients with inflammatory diseases such as arthritis (Kaiser, “‘Liquid Biopsy for Cancer Promises Early Detection,” Science 359(6373):259 (2018)). With the growing obesity epidemic and an aging population in the U.S., the risk of false-positives from protein markers increases with obesity and age-driven inflammation.

[0017] More recently, the NGS sequencing companies (Grail, Guardant Health, Natera, Freenome) have moved aggressively to expand their targeted sequencing panels to also now include whole genome sequencing (WGS) and whole genome bisulfite sequencing (Bis-WGS). The recent results from Grail, abstract published at ASCO 2018 (Klein et al., “Development of a Comprehensive Cell-free DNA (cfDNA) Assay for Early Detection of Multiple Tumor Types: The Circulating Cell-free Genome Atlas (CCGA) Study,” ASCO Annual Meeting 2018, Chicago, Ill.; Abstract 12021 #134)) reveal that while sensitivity claims of detecting “early” CRC are at 63%, that is based on only 27 samples, most of which are Stage III. Even mutation rich lung cancer gives sensitivity at 50%, again with most samples at Stage III. When most of the samples are Stage I & II, such as prostate cancer, the sensitivity for “early cancer” detection drops to <5%. When attempting to detect the most common form of breast cancer (HR+/HER2), the sensitivity drops to <13%. Worse, those breast cancers diagnosed by screening gave sensitivities of <11%. In short, the NGS approach fails by consistently missing 30% to 80% of early-stage cancers (i.e. stage I & II). In a research initially reported in 2019 ASCO meeting (Liu et al., “Simultaneous Multi-cancer Detection and Tissue of Origin (TOO) Localization Using Targeted Bisulfite Sequencing Plasma Cell-free DNA (cfDNA),” ASCO Breakthrough Presentation 2019)), and subsequently published in 2020 (Liu et al., “Sensitive and Specific Multi-cancer Detection and Localization Using Methylation Signatures in Cell-free DNA,” Annals of Oncology; In Press (2020)), GRAIL indicated that their Multi-Cancer Early Detection Test exhibited an Overall Detection Rate (12 deadly cancer types) of 76% (99.3% specificity). A combined analysis of this group of cancers showed robust detection across all stages with detection rates of 39 percent (27-52%), 69 percent (56-80%), 83 percent (75-90%), and 92 percent (86-96%) at stages I (n=62), II (n=62), III (n=102), and IV (n=130), respectively. In another conference, GRAIL and collaborators (Oxnard et al., “Simultaneous Multi-cancer Detection and Tissue of Origin (TOO) Localization Using Targeted Bisulfite Sequencing of Plasma Cell-free DNA (cfDNA),” ESMO Congress (2019)), reported the results from their analysis of cell-free DNA (DNA that had once been confined to cells but had entered the bloodstream upon the cells' death) in 3,583 blood samples, including 1,530 from patients diagnosed with cancer and 2,053 from people without cancer. The patient samples comprised more than 20 types of cancer, including hormone receptor-negative breast, colorectal, esophageal, gallbladder, gastric, head and neck, lung, lymphoid leukemia, multiple myeloma, ovarian, and pancreatic cancer. The overall specificity was 99.4%, meaning only 0.6% of the results incorrectly indicated that cancer was present. The sensitivity of the assay for detecting a pre-specified high mortality cancer (the percent of blood samples from these patients that tested positive for cancer) was 76%. Within this group, the sensitivity was 32% for patients with stage I cancer; 76% for those with stage II; 85% for stage III; and 93% for stage IV. Sensitivity across all cancer types was 55%, with similar increases in detection by stage. For the 97% of samples that returned a tissue of origin result, the test correctly identified the organ or tissue of origin in 89% of cases. However, another 2019 study (reported by GRAIL and collaborators) questioned the validity of the aforementioned reports (Razavi et al., “High-intensity Sequencing Reveals the Sources of Plasma Circulating Cell-free DNA Variants,” Nat Med 25(12):1928-1937 (2019)). Through a 2 Mb, 508-gene panel sequencing (60,000×depth), the authors demonstrated the vast majority of cell-free DNA mutations in both non-cancer controls and cancer patients had features consistent with clonal hematopoiesis, a process whereby white blood cells progressively accumulate somatic alterations without necessarily producing a hematological condition or malignancy. Indeed. mutations appeared in 93.6 percent of the white blood cells from individuals without cancer and 99.1 percent of those with cancer. In a recently held conference, GRAIL and their collaborators reported that their blood-based test can detect multiple GI cancers at sensitivity of under 50% for Stage I, and 73% for Stage I-III (Wolpin et al., “Performance of a Blood-based Test for the Detection of Multiple Cancer Types,” In: Gastrointestinal Cancers Symposium 2020 (2020)). As for Freenome, a recent ASCO presentation indicated that their platform (plasma analysis by whole-genome sequencing, bisulfite sequencing, and protein quantification methods) was able to achieve a mean sensitivity of 92% in early-stage (n=17) and 84% in late-stage (n=11) at a specificity of 90% for colorectal adenocarcinoma detection. Across all CRC pathological subtypes, the Freenome test achieved a specificity of 90%, and sensitivities of 80% and 83% for early-stage (n=19) and late-stage (n=12), respectively. Private discussion with Imran Haque, who just resigned as CSO of Freenome—where he had a $70 million budget and 30 scientists to sequence the plasma of 817 CRC and matched control patients−confirmed that Freenome (as well as GRAIL) were overcalling the data, and that none of them had a cogent approach to achieve cost-effective true early cancer detection (Wan et al., “Machine Learning Enables Detection of Early-stage Colorectal Cancer by Whole-genome Sequencing of Plasma Cell-free DNA,” BioRxiv 478065 (2018)).

[0018] A comprehensive data analysis of over 600 colorectal cancer samples that takes into account tumor heterogeneity, tumor clusters, and biological/technical false-positives ranging from 3% to 10% per individual marker showed that the optimal early detection screen for colorectal cancer would require at least 5 to 6 positive markers out of 24 markers tested (Bacolod et al. Cancer Res. 69:723-727 (2009); Tsafrir et al., Cancer Res. 66: 2129-2137 (2006); Weinstein et al., Nat. Genet. 45: 1113-1120 (2013); Navin N. E. Genome Biol. 15: 452 (2014); Hiley et al., Genome Biol 15:453 (2014)); Esserman et al. Lancet Oncol 15:e234-242 (2014)). Further, marker distribution is biased into different tumor clades, e.g., some tumors are heavily methylated, while others are barely methylated, and indistinguishable from age-related methylation of adjacent tissue. Consequently, a multidimensional approach using combinations of 3-5 sets of mutation, methylation, miRNA, ncRNA, lncRNA, mRNA, copy-variation, alternative splicing, or translocation markers is needed to obtain sufficient coverage of all different tumor clades. Analogous to non-invasive prenatal screening for trisomy, based on sequencing or performing ligation detection on random fragments of cfDNA (Benn et al., Ultrasound Obstet. Gynecol. 42(1):15-33 (2013); Chiu et al., Proc. Natl. Acad. Sci. USA 105: 20458-20463 (2008); Juneau et al., Fetal Diagn. Ther. 36(4) (2014)), the actual markers scored in a cancer screen are secondary to accurate quantification of those positive markers in the plasma.

[0019] As pointed out above, cancer-specific RNA markers (including microRNAs, lncRNAs, and mRNAs) may also be present in blood, either free of any compartment (Souza et al., “Circulating mRNAs and miRNAs as Candidate Markers for the Diagnosis and Prognosis of Prostate Cancer,” PloS One 12(9):e0184094 (2017)), or contained in exosomes (Nedaeinia et al., “Circulating Exosomes and Exosomal microRNAs as Biomarkers in Gastrointestinal Cancer,” Cancer Gene Ther 24(2):48-56 (2017); Lai et al., “A microRNA Signature in Circulating Exosomes is Superior to Exosomal Glypican-1 Levels for Diagnosing Pancreatic Cancer,” Cancer Lett 39:86-93 (2017)) or circulating tumor cells (“CTCs”), and have been tagged as potential indicators of early-stage cancers. Challenges abound regarding the use of plasma-derived nucleic markers in early cancer detection, including the minuscule amount of these markers in blood relative to those derived from surrounding cells. Indeed, these limitations make it appear that these “early” detection assays are more likely to detect late-stage primary and metastatic cancers (Pantel “Blood-Based Analysis of Circulating Cell-Free DNA and Tumor Cells for Early Cancer Detection,” PLoS Med 13(12):e1002205 (2016)).

### Technical Challenges of Cancer Diagnostic Test Development.

[0020] Diagnostic tests that aim to find very rare or low-abundance mutant sequences face potential false-positive signal arising from: (i) polymerase error in replicating wild-type target, (ii) DNA sequencing error, (iii) mis-ligation on wild-type target, (iii) target independent PCR product, and (iv) carryover contamination of PCR products arising from a previous positive sample. The profound clinical implications of a positive test result when screening for cancer demand that such a test use all means possible to virtually eliminate false-positives.

[0021] Central to the concept of nucleic acid detection is the selective amplification or purification of the desired cancer-specific markers away from the same or closely similar markers from normal cells. These approaches include: (i) multiple primer binding regions for orthogonal amplification and detection, (ii) affinity selection of CTC's or exosomes, and (iii) spatial dilution of the sample.

[0022] The success of PCR-LDR, which uses 4 primer-binding regions to assure sensitivity and specificity, has previously been demonstrated. Desired regions are amplified using pairs or even tandem pairs of PCR primers, followed by orthogonal nested LDR primer pairs for detection. One advantage of using PCR-LDR is the ability to perform proportional PCR amplification of multiple fragments to enrich for low copy targets, and then use quantitative LDR to directly identify cancer-specific mutations. Biofire/bioMerieux has developed a similar technology termed “film array”; wherein initial multiplexed PCR reaction products are redistributed into individual wells, and then nested real-time PCR performed with SYBR Green Dye detection.

[0023] Affinity purification of CTC's using antibody or aptamer capture has been demonstrated (Adams et al., J. Am. Chem. Soc. 130: 8633-8641 (2008); Dharmasiri et al., Electrophoresis 30:3289-3300 (2009); Soper et al. Biosens. Bioelectron. 21:1932-1942 (2006)). Peptide affinity capture of exosomes has been reported in the literature. Enrichment of these tumor-specific fractions from the blood enables copy number quantification, as well as simplifying screening and verification assays.

[0024] The last approach, spatial dilution of the sample, is employed in digital PCR as well as its close cousin known as BEAMing (Vogelstein and Kinzler, Proc. Natl. Acad. Sci. USA. 96(16):9236-41 (1999); Dressman et al., Proc. Natl. Acad. Sci. USA 100:8817-8822 (2003)). The rational for digital PCR is to overcome the limit of enzymatic discrimination when the sample comprises very few target molecules containing a known mutation in a 1,000 to 10,000-fold excess of wild-type DNA. By diluting input DNA into 20,000 or more droplets or beads to distribute less than one molecule of target per droplet, the DNA may be amplified via PCR, and then detected via probe hybridization or TaqMan™ reaction, giving in essence a 0/1 digital score. The approach is currently the most sensitive for finding point mutations in plasma, but it does require prior knowledge of the mutations being scored, as well as a separate digital dilution for each mutation, which would deplete the entire sample to score just a few mutations (Alcaide et al., “A Novel Multiplex Droplet Digital PCR Assay to Identify and Quantify KRAS Mutations in Clinical Specimens,” J. Mol. Diagn. 21:28-33 (2019); Guibert et al., “Liquid Biopsy of Fine-Needle Aspiration Supernatant for Lung Cancer Genotyping,” Lung Cancer 1768:193-207 (2018); Yoshida et al., “Highly Sensitive Detection of ALK Resistance Mutations in Plasma Using Droplet Digital PCR,” BMC Cancer 18:1136 (2018)).

[0025] When developing multiplexed assays, there is a tricky balance between performing enough preliminary cycles of PCR or other amplification techniques to generate sufficient copies of each mutant or methylated region such that when diluting into uniplex qPCR, multiplex qPCR, uniplex droplet PCR or multiplexed droplet PCR there are sufficient copies to get a signal if true positive; and performing too many PCR cycles such that some markers over-amplify while others are suppressed, or relative quantification is lost.

[0026] The present application is directed at overcoming these and other deficiencies in the art.

### SUMMARY

[0027] A first aspect of the present application is directed to a method for identifying, in a sample, one or more parent nucleic acid molecules containing a target nucleotide sequence differing from nucleotide sequences of other parent nucleic acid molecules in the sample by one or more nucleotides, one or more copy numbers, one or more transcript sequences, and/or one or more methylated residues. The method involves providing a sample containing one or more parent nucleic acid molecules potentially containing the target nucleotide sequence differing from the nucleotide sequences of other parent nucleic acid molecules by one or more nucleotides, one or more copy numbers, one or more transcript sequences, and/or one or more methylated residues. One or more enzymes capable of digesting deoxyuracil (dU)-containing nucleic acid molecules are then provided. One or more primary oligonucleotide primer sets are also provided. Each primary oligonucleotide primer set comprises (a) a first primary oligonucleotide primer that comprises a nucleotide sequence that is complementary to a sequence in the parent nucleic acid molecule adjacent to the target nucleotide sequence and (b) a second primary oligonucleotide primer that comprises a nucleotide sequence that is complementary to a portion of an extension product formed from the first primary oligonucleotide primer. The sample, the one or more first primary oligonucleotide primers of the primary oligonucleotide primer sets, the one or more enzymes capable of digesting deoxyuracil (dU)-containing nucleic acid molecules, a deoxynucleotide mix, and a DNA polymerase are blended to form one or more polymerase extension reaction mixtures, and the one or more polymerase extension reaction mixtures are subjected to conditions suitable for digesting deoxyuracil (dU)-containing nucleic acid molecules present in the polymerase extension reaction mixtures and for carrying out one or more polymerase extension reaction cycles comprising a denaturation treatment, a hybridization treatment, and an extension treatment, thereby forming primary extension products comprising nucleotide sequences complementary to the target nucleotide sequence. The one or more polymerase extension reaction mixtures comprising the primary extension products, the one or more second primary oligonucleotide primers of the primary oligonucleotide primer sets, the one or more enzymes capable of digesting deoxyuracil (dU)-containing nucleic acid molecules in the reaction mixtures, a deoxynucleotide mix including dUTP, and a DNA polymerase are blended to form one or more first polymerase chain reaction mixtures. The method further comprises subjecting the one or more first polymerase chain reaction mixtures to conditions suitable for digesting deoxyuracil (dU)-containing nucleic acid molecules present in the polymerase chain reaction mixtures and for carrying out one or more polymerase chain reaction cycles comprising a denaturation treatment, a hybridization treatment, and an extension treatment, thereby forming one or more first polymerase chain reaction products comprising the target nucleotide sequence or a complement thereof. One or more oligonucleotide probe sets are then provided. Each probe set comprises (a) a first oligonucleotide probe having a 5′ primer-specific portion and a 3′ target sequence-specific portion, and (b) a second oligonucleotide probe having a 5′ target sequence-specific portion and a 3′ primer-specific portion, wherein the first and second oligonucleotide probes of a probe set are configured to hybridize, in a base specific manner, on a complementary target nucleotide sequence of a secondary extension product. The one or more first polymerase chain reaction products are blended with a ligase, and the one or more oligonucleotide probe sets to form one or more ligation reaction mixtures. The one or more ligation reaction mixtures are subjected to one or more ligation reaction cycles whereby the first and second oligonucleotide probes of the one or more oligonucleotide probe sets are ligated together, when hybridized to complementary sequences, to form ligated product sequences in the ligation reaction mixtures wherein each ligated product sequence comprises the 5′ primer-specific portion, the target-specific portions, and the 3′ primer-specific portion. The method further includes providing one or more secondary oligonucleotide primer sets. Each secondary oligonucleotide primer set comprises (a) a first secondary oligonucleotide primer comprising the same nucleotide sequence as the 5′ primer-specific portion of the ligated product sequence and (b) a second secondary oligonucleotide primer comprising a nucleotide sequence that is complementary to the 3′ primer-specific portion of the ligated product sequence. The ligated product sequences, the one or more secondary oligonucleotide primer sets, the one or more enzymes capable of digesting deoxyuracil (dU)-containing nucleic acid molecules, a deoxynucleotide mix including dUTP, and a DNA polymerase are blended to form one or more second polymerase chain reaction mixtures. The one or more second polymerase chain reaction mixtures are subjected to conditions suitable for digesting deoxyuracil (dU)-containing nucleic acid molecules present in the second polymerase chain reaction mixtures and for carrying out one or more polymerase chain reaction cycles comprising a denaturation treatment, a hybridization treatment, and an extension treatment thereby forming one or more second polymerase chain reaction products. The method further comprises detecting and distinguishing the one or more second polymerase chain reaction products in the one or more second polymerase chain reaction mixtures to identify the presence of one or more parent nucleic acid molecules containing target nucleotide sequences differing from nucleotide sequences in other parent nucleic acid molecules in the sample by one or more nucleotides, one or more copy numbers, one or more transcript sequences, and/or one or more methylated residues.

[0028] Another aspect of the present application is directed to a method for identifying, in a sample, one or more parent nucleic acid molecules containing a target nucleotide sequence differing from nucleotide sequences in other parent nucleic acid molecules in the sample by one or more nucleotides, one or more copy numbers, one or more transcript sequences, and/or one or more methylated residues. The method involves providing a sample containing one or more parent nucleic acid molecules potentially containing the target nucleotide sequence differing from the nucleotide sequences of other parent nucleic acid molecules by one or more nucleotides, one or more copy numbers, one or more transcript sequences, and/or one or more methylated residues. One or more enzymes capable of digesting deoxyuracil (dU) containing nucleic acid molecules, one or more nucleases capable of digesting nucleic acid molecules not comprising modified nucleotides, and one or more first primary oligonucleotide primer(s) are provided. The one or more first primary oligonucleotide primer(s) comprise a nucleotide sequence that is complementary to a sequence in the parent nucleic acid molecule adjacent to the target nucleotide sequence. The sample, the one or more first primary oligonucleotide primers, the one or more enzymes capable of digesting deoxyuracil (dU)-containing nucleic acid molecules, a deoxynucleotide mix that comprises one or more modified nucleotides that protect extension products but not target DNA from nuclease digestion, and a DNA polymerase are blended to form one or more polymerase extension reaction mixtures, and the one or more polymerase extension reaction mixtures are subjected to conditions suitable for digesting deoxyuracil (dU)-containing nucleic acid molecules present in the polymerase extension reaction mixture and for carrying out one or more polymerase extension reaction cycles comprising a denaturation treatment, a hybridization treatment, and an extension treatment, thereby forming primary extension products comprising the complement of the target nucleotide sequence. The method further comprises providing one or more secondary oligonucleotide primer sets. Each secondary oligonucleotide primer set comprises (a) a first secondary oligonucleotide primer having a first 5′ primer-specific portion and a 3′ portion that is complementary to a portion of a primary extension product formed from the first primary oligonucleotide primer and (b) a second secondary oligonucleotide primer having a second 5′ primer-specific portion and a 3′ portion that comprises a nucleotide sequence that is complementary to a portion of an extension product formed from the first secondary oligonucleotide primer. The one or more polymerase extension reaction mixtures comprising the primary extension products, the one or more secondary oligonucleotide primer sets, the one or more nucleases, a deoxynucleotide mix, and a DNA polymerase are blended to form one or more first polymerase chain reaction mixtures, and the one or more first polymerase chain reaction mixtures are subjected to conditions suitable for digesting nucleic acid molecules present in the first polymerase chain reaction mixtures, but not primary extension products comprising modified nucleotides and for carrying out two or more polymerase chain reaction cycles comprising a denaturation treatment, a hybridization treatment, and an extension treatment, thereby forming one or more first polymerase chain reaction products comprising the first 5′ primer-specific portion, a target-specific nucleotide sequence or a complement thereof, and a complement of the second 5′ primer-specific portion. One or more tertiary oligonucleotide primer sets are provided. Each tertiary oligonucleotide primer set comprises (a) a first tertiary oligonucleotide primer comprising the same nucleotide sequence as the first 5′ primer-specific portion of the one or more first polymerase chain reaction products and (b) a second tertiary oligonucleotide primer comprising a nucleotide sequence that is complementary to the 3′ primer-specific portion of the one or more first polymerase chain reaction products. The one or more first polymerase chain reaction products, the one or more tertiary oligonucleotide primer sets, the one or more enzymes capable of digesting deoxyuracil (dU) containing nucleic acid molecules, a deoxynucleotide mix including dUTP, and a DNA polymerase are blended to form one or more second polymerase chain reaction mixtures, and the one or more second polymerase chain reaction mixtures are subjected to conditions suitable for digesting deoxyuracil (dU) containing nucleic acid molecules present in the second polymerase chain reaction mixtures and for carrying out one or more polymerase chain reaction cycles comprising a denaturation treatment, a hybridization treatment, and an extension treatment, thereby forming one or more second polymerase chain reaction products. The method further involves detecting and distinguishing the one or more second polymerase chain reaction products in the one or more second polymerase chain reaction mixtures to identify the presence of one or more parent nucleic acid molecules containing target nucleotide sequences differing from nucleotide sequences in other parent nucleic acid molecules in the sample by one or more nucleotides, one or more copy numbers, one or more transcript sequences, and/or one or more methylated residues.

[0029] Another aspect of the present application is directed to a method for identifying, in a sample, one or more parent nucleic acid molecules containing a target nucleotide sequence differing from nucleotide sequences of other parent nucleic acid molecules in the sample by one or more nucleotides, one or more copy numbers, one or more transcript sequences, and/or one or more methylated residues. The method involves providing a sample containing one or more parent nucleic acid molecules potentially containing the target nucleotide sequence differing from the nucleotide sequences of other parent nucleic acid molecules by one or more nucleotides, one or more copy numbers, one or more transcript sequences, and/or one or more methylated residues. One or more enzymes capable of digesting deoxyuracil (dU)-containing nucleic acid molecules and one or more nucleases capable of digesting nucleic acid molecules present not comprising modified nucleotides are provided. The method also involves providing one or more primary oligonucleotide primer sets. Each primary oligonucleotide primer set comprises (a) a first primary oligonucleotide primer that comprises a nucleotide sequence that is complementary to a sequence in the parent nucleic acid molecule adjacent to the target nucleotide sequence and (b) a second primary oligonucleotide primer that comprises a nucleotide sequence that is complementary to a portion of an extension product formed from the first primary oligonucleotide primer. The sample, the one or more first primary oligonucleotide primers of the primary oligonucleotide primer sets, the one or more enzymes capable of digesting deoxyuracil (dU)-containing nucleic acid molecules, a deoxynucleotide mix that comprises one or more modified nucleotides that protect extension product but not target DNA from nuclease digestion, and a DNA polymerase are blended to form one or more polymerase extension reaction mixtures, and the one or more polymerase extension reaction mixtures are subjected to conditions suitable for digesting deoxyuracil (dU)-containing nucleic acid molecules present in the polymerase extension reaction mixtures and for carrying out one or more polymerase extension reaction cycles comprising a denaturation treatment, a hybridization treatment, and an extension treatment, thereby forming primary extension products comprising the complement of the target nucleotide sequence. The method further comprises blending the one or more polymerase extension reaction mixtures comprising the primary extension products, the one or more second primary oligonucleotide primers of the one or more primary oligonucleotide primer sets, the one or more nucleases, a deoxynucleotide mix, and a DNA polymerase to form one or more first polymerase chain reaction mixtures. The one or more first polymerase chain reaction mixtures are subjected to conditions suitable for digesting nucleic acid molecules present in the polymerase chain reaction mixtures, but not primary extension products comprising modified nucleotides and for carrying out two or more polymerase chain reaction cycles comprising a denaturation treatment, a hybridization treatment, and an extension treatment, thereby forming first polymerase chain reaction products comprising the target nucleotide sequence or a complement thereof. One or more secondary oligonucleotide primer sets are then provided. Each secondary oligonucleotide primer set comprises (a) a first secondary oligonucleotide primer having a 3′ portion that is complementary to a portion of an extension product formed from the first primary oligonucleotide primer and (b) a second secondary oligonucleotide primer having a 3′ portion that comprises a nucleotide sequence that is complementary to a portion of an extension product formed from the first secondary oligonucleotide primer. The first polymerase chain reaction products, the one or more secondary oligonucleotide primer sets, the one or more enzymes capable of digesting deoxyuracil (dU) containing nucleic acid molecules, a deoxynucleotide mix including dUTP, and a DNA polymerase are blended to form one or more second polymerase chain reaction mixtures. The one or more second polymerase chain reaction mixtures are subjected to conditions suitable for digesting deoxyuracil (dU)-containing nucleic acid molecules present in the second polymerase chain reaction mixtures and for carrying out two or more polymerase chain reaction cycles comprising a denaturation treatment, a hybridization treatment, and an extension treatment thereby forming second polymerase chain reaction products. The method further comprises detecting and distinguishing the second polymerase chain reaction products in the one or more second polymerase chain reaction mixtures to identify the presence of one or more parent nucleic acid molecules containing target nucleotide sequences differing from nucleotide sequences in other parent nucleic acid molecules in the sample by one or more nucleotides, one or more copy numbers, one or more transcript sequences, and/or one or more methylated residues.

[0030] Another aspect of the present application is directed to a method for identifying, in a sample, one or more parent nucleic acid molecules containing a target nucleotide sequence differing from nucleotide sequences in other parent nucleic acid molecules in the sample by one or more methylated residues. The method involves providing a sample containing one or more parent nucleic acid molecules potentially containing the target nucleotide sequence differing from the nucleotide sequences in other parent nucleic acid molecules by one or more methylated residues and subjecting the nucleic acid molecules in the sample to a bisulfite treatment under conditions suitable to convert unmethylated cytosine residues to uracil residues. One or more enzymes capable of digesting deoxyuracil (dU)-containing nucleic acid molecules are then provided. The method further involves providing one or more primary oligonucleotide primer sets. Each primary oligonucleotide primer set comprises (a) a first primary oligonucleotide primer that comprises a nucleotide sequence that is complementary to a sequence in the bisulfite-treated parent nucleic acid molecules adjacent to the bisulfite-treated target nucleotide sequence containing the one or more methylated residue and (b) a second primary oligonucleotide primer that comprises a nucleotide sequence that is complementary to a portion of an extension product formed from the first primary oligonucleotide primer. The bisulfate-treated sample, the one or more first primary oligonucleotide primers of the one or more primary oligonucleotide primer sets, a deoxynucleotide mix, and a DNA polymerase are blended to form one or more polymerase extension reaction mixtures, and the one or more polymerase extension reaction mixtures are subjected to conditions suitable for one or more polymerase extension reaction cycles comprising a denaturation treatment, a hybridization treatment, and an extension treatment, thereby forming primary extension products comprising the complement of the bisulfite-treated target nucleotide sequence. The one or more polymerase extension reaction mixtures comprising the primary extension products, the one or more secondary primary oligonucleotide primers of the one or more primary oligonucleotide primer sets, the one or more enzymes capable of digesting deoxyuracil (dU)-containing nucleic acid molecules, a deoxynucleotide mix including dUTP, and a DNA polymerase are blended to form one or more first polymerase chain reaction mixtures. The one or more first polymerase chain reaction mixtures are subjected to conditions suitable for digesting deoxyuracil (dU)-containing nucleic acid molecules present in the first polymerase chain reaction mixtures and for carrying out one or more polymerase chain reaction cycles comprising a denaturation treatment, a hybridization treatment, and an extension treatment, thereby forming first polymerase chain reaction products comprising the bisulfite-treated target nucleotide sequence or a complement thereof. The method further involves providing one or more oligonucleotide probe sets. Each probe set comprises (a) a first oligonucleotide probe having a 5′ primer-specific portion and a 3′ bisulfite-treated target nucleotide sequence-specific or complement sequence-specific portion, and (b) a second oligonucleotide probe having a 5′ bisulfite-treated target nucleotide sequence-specific or complement sequence-specific portion and a 3′ primer-specific portion, and wherein the first and second oligonucleotide probes of a probe set are configured to hybridize, in a base specific manner, on a complementary nucleotide sequence of a first polymerase chain reaction product. The first polymerase chain reaction products are blended with a ligase and the one or more oligonucleotide probe sets to form one or more ligation reaction mixtures. The one or more ligation reaction mixtures are subjected to one or more ligation reaction cycles whereby the first and second oligonucleotide probes of the one or more oligonucleotide probe sets are ligated together, when hybridized to complementary sequences, to form ligated product sequences in the ligation reaction mixture wherein each ligated product sequence comprises the 5′ primer-specific portion, the bisulfite-treated target nucleotide sequence-specific or complement sequence-specific portions, and the 3′ primer-specific portion. The method further comprises providing one or more secondary oligonucleotide primer sets. Each secondary oligonucleotide primer set comprises (a) a first secondary oligonucleotide primer comprising the same nucleotide sequence as the 5′ primer-specific portion of the ligated product sequence and (b) a second secondary oligonucleotide primer comprising a nucleotide sequence that is complementary to the 3′ primer-specific portion of the ligated product sequence. The ligated product sequences, the one or more secondary oligonucleotide primer sets, the one or more enzymes capable of digesting deoxyuracil (dU)-containing nucleic acid molecules, a deoxynucleotide mix including dUTP, and a DNA polymerase are blended to form one or more second polymerase chain reaction mixtures, and the one or more second polymerase chain reaction mixtures are subjected to conditions suitable for digesting deoxyuracil (dU)-containing nucleic acid molecules present in the second polymerase chain reaction mixtures and for carrying out one or more polymerase chain reaction cycles comprising a denaturation treatment, a hybridization treatment, and an extension treatment thereby forming a second polymerase chain reaction products. The method further involves detecting and distinguishing the second polymerase chain reaction products in the one or more second polymerase chain reaction mixtures to identify the presence of one or more nucleic acid molecules containing target nucleotide sequences differing from nucleotide sequences in other parent nucleic acid molecules in the sample by one or more methylated residues.

[0031] Another aspect of the present application is directed to a method for identifying, in a sample, one or more parent nucleic acid molecules containing a target nucleotide sequence differing from nucleotide sequences in other parent nucleic acid molecules in the sample by one or more methylated residues. The method involves providing a sample containing one or more parent nucleic acid molecules potentially containing the target nucleotide sequence differing from the nucleotide sequences in other parent nucleic acid molecules by one or more methylated residues. The nucleic acid molecules in the sample are subjected to a bisulfite treatment under conditions suitable to convert unmethylated cytosine residues to uracil residues. One or more enzymes capable of digesting deoxyuracil (dU)-containing nucleic acid molecules are provided, and one or more first primary oligonucleotide primer(s) are provided. Each first primary oligonucleotide primer comprises a nucleotide sequence that is complementary to a sequence in the bisulfite-treated parent nucleic acid molecules adjacent to the bisulfite-treated target nucleotide sequence containing the one or more methylated residue. The bisulfite-treated sample, the one or more first primary oligonucleotide primers, a deoxynucleotide mix, and a DNA polymerase are blended to form one or more polymerase extension reaction mixtures, and the one or more polymerase extension reaction mixtures are subjected to conditions suitable for one or more polymerase extension reaction cycles comprising a denaturation treatment, a hybridization treatment, and an extension treatment, to form primary extension products comprising the complement of the bisulfite-treated target nucleotide sequence. The method further comprises providing one or more secondary oligonucleotide primer sets. Each secondary oligonucleotide primer set comprises (a) a first secondary oligonucleotide primer having a 5′ primer-specific portion and a 3′ portion that is complementary to a portion of the polymerase extension reaction product formed from the first primary oligonucleotide primer and (b) a second secondary oligonucleotide primer having a 5′ primer-specific portion and a 3′ portion that comprises a nucleotide sequence that is complementary to a portion of an extension product formed from the first secondary oligonucleotide primer. The one or more polymerase extension reaction mixtures comprising the primary extension products, the one or more secondary oligonucleotide primer sets, the one or more enzymes capable of digesting deoxyuracil (dU)-containing nucleic acid molecules, a deoxynucleotide mix, and a DNA polymerase are blended to form one or more first polymerase chain reaction mixtures, and the one or more first polymerase chain reaction mixtures are subjected to conditions suitable for digesting nucleic acid molecules present in the first polymerase chain reaction mixtures, but not primary extension products comprising modified nucleotides and for carrying out two or more polymerase chain reaction cycles comprising a denaturation treatment, a hybridization treatment, and an extension treatment, thereby forming first polymerase chain reactions products comprising a 5′ primer-specific portion of the first secondary oligonucleotide primer, the bisulfite-treated target nucleotide sequence-specific or complement sequence-specific portion, and a complement of the 5′ primer-specific portion of the second secondary oligonucleotide primer. The method further involves providing one or more tertiary oligonucleotide primer sets. Each tertiary oligonucleotide primer set comprises (a) a first tertiary oligonucleotide primer comprising the same nucleotide sequence as the 5′ primer-specific portion of the first polymerase chain reaction products and (b) a second tertiary oligonucleotide primer comprising a nucleotide sequence that is complementary to the 3′ primer-specific portion of the first polymerase chain reactions product sequence. The first polymerase chain reaction products, the one or more tertiary oligonucleotide primer sets, the one or more enzymes capable of digesting deoxyuracil (dU) containing nucleic acid molecules, a deoxynucleotide mix including dUTP, and a DNA polymerase are blended to form one or more second polymerase chain reaction mixtures. The one or more second polymerase chain reaction mixtures are subjected to conditions suitable for digesting deoxyuracil (dU)-containing nucleic acid molecules present in the second polymerase chain reaction mixtures and for carrying out one or more polymerase chain reaction cycles comprising a denaturation treatment, a hybridization treatment, and an extension treatment thereby forming secondary polymerase chain reaction products. The method further involves detecting and distinguishing the secondary polymerase chain reactions products in the one or more second polymerase chain reaction mixtures to identify the presence of one or more parent nucleic acid molecules containing target nucleotide sequences differing from nucleotide sequences in other parent nucleic acid molecules in the sample by one or more methylated residues.

[0032] Another aspect of the present application is directed to a method for identifying, in a sample, one or more parent nucleic acid molecules containing a target nucleotide sequence differing from nucleotide sequences in other parent nucleic acid molecules in the sample by one or more methylated residues. The method involves providing a sample containing one or more parent nucleic acid molecules potentially containing the target nucleotide sequence differing from the nucleotide sequences in other parent nucleic acid molecules by one or more methylated residues. The nucleic acid molecules in the sample are subjected to a bisulfite treatment under conditions suitable to convert unmethylated cytosine residues to uracil residues. One or more enzymes capable of digesting deoxyuracil (dU)-containing nucleic acid molecules present in the sample are provided, and one or more primary oligonucleotide primer sets are provided. Each primary oligonucleotide primer set comprises (a) a first primary oligonucleotide primer that comprises a nucleotide sequence that is complementary to a sequence in the bisulfite-treated parent nucleic acid molecules adjacent to the bisulfite-treated target nucleotide sequence containing the one or more methylated residue and (b) a second primary oligonucleotide primer that comprises a nucleotide sequence that is complementary to a portion of an extension product formed from the first primary oligonucleotide primer. The bisulfite-treated sample, the one or more first primary oligonucleotide primers of the one or more primary oligonucleotide primer sets, a deoxynucleotide mix, and a DNA polymerase are blended to form one or more polymerase extension reaction mixtures. The one or more polymerase extension reaction mixtures to are subjected to conditions suitable for one or more polymerase extension reaction cycles comprising a denaturation treatment, a hybridization treatment, and an extension treatment, thereby forming primary extension products comprising the complement of the bisulfite treated target nucleotide sequence. The one or more polymerase extension reaction mixtures comprising the primary extension products, the one or more secondary primary oligonucleotide primers of the one or more primary oligonucleotide primer sets, the one or more enzymes capable of digesting deoxyuracil (dU)-containing nucleic acid molecules in the reaction mixture, a deoxynucleotide mix, and a DNA polymerase are blended to form one or more first polymerase chain reaction mixtures. The one or more first polymerase chain reaction mixtures are subjected to conditions suitable for digesting deoxyuracil (dU)-containing nucleic acid molecules present in the first polymerase chain reaction mixtures and for carrying out one or more polymerase chain reaction cycles comprising a denaturation treatment, a hybridization treatment, and an extension treatment, thereby forming first polymerase chain reaction products comprising the bisulfite-treated target nucleotide sequence or a complement thereof. The method further comprises providing one or more secondary oligonucleotide primer sets. Each secondary oligonucleotide primer set comprises (a) a first secondary oligonucleotide primer having a 3′ portion that is complementary to a portion of a first polymerase chain reaction product formed from the first primary oligonucleotide primer and (b) a second secondary oligonucleotide primer having a 3′ portion that comprises a nucleotide sequence that is complementary to a portion of a first polymerase chain reaction product formed from the first secondary oligonucleotide primer. The first polymerase chain reaction products, the one or more secondary oligonucleotide primer sets, the one or more enzymes capable of digesting deoxyuracil (dU)-containing nucleic acid molecules, a deoxynucleotide mix including dUTP, and a DNA polymerase are blended to form one or more second polymerase chain reaction mixtures. The one or more second polymerase chain reaction mixtures are subjected to conditions suitable for digesting deoxyuracil (dU)-containing nucleic acid molecules present in the second polymerase chain reaction mixtures and for carrying out two or more polymerase chain reaction cycles comprising a denaturation treatment, a hybridization treatment, and an extension treatment thereby forming second polymerase chain reaction products. The method further involves detecting and distinguishing the second polymerase chain reactions products in the one or more second polymerase chain reaction mixtures to identify the presence of one or more parent nucleic acid molecules containing target nucleotide sequences differing from nucleotide sequences in other parent nucleic acid molecules in the sample by one or more methylated residues.

[0033] Another aspect of the present application is directed to a method for identifying, in a sample, one or more parent nucleic acid molecules containing a target nucleotide sequence differing from nucleotide sequences in other parent nucleic acid molecules in the sample by one or more methylated residues. The method involves providing a sample containing one or more parent nucleic acid molecules potentially containing the target nucleotide sequence differing from the nucleotide sequences in other parent nucleic acid molecules by one or more methylated residues, and subjecting the nucleic acid molecules in the sample to a bisulfite treatment under conditions suitable to convert unmethylated cytosine residues to uracil residues. One or more enzymes capable of digesting deoxyuracil (dU)-containing nucleic acid molecules present in the sample are provided. One or more primary oligonucleotide primer sets are also provided. Each primary oligonucleotide primer set comprises (a) a first primary oligonucleotide primer having a 5′ primer-specific portion and a 3′ portion that comprises a nucleotide sequence that is complementary to a sequence in the bisulfite-treated parent nucleic acid molecules adjacent to the bisulfite-treated target nucleotide sequence containing the one or more methylated residue and (b) a second primary oligonucleotide primer having a 5′ primer-specific portion and a 3′ portion that comprises a nucleotide sequence that is complementary to a portion of an extension product formed from the first primary oligonucleotide primer. The bisulfate treated sample, the one or more first primary oligonucleotide primers of the one or more primary oligonucleotide primer sets, a deoxynucleotide mix, and a DNA polymerase are blended to form one or more polymerase extension reaction mixtures. The one or more polymerase extension reaction mixtures are subjected to conditions suitable for one or more polymerase extension reaction cycles comprising a denaturation treatment, a hybridization treatment, and an extension treatment, thereby forming primary extension products comprising the complement of the bisulfate treated target nucleotide sequence. The one or more polymerase extension reaction mixtures comprising the primary extension products, the one or more secondary primary oligonucleotide primers of the one or more primary oligonucleotide primer sets, the one or more enzymes capable of digesting deoxyuracil (dU)-containing nucleic acid molecules in the reaction mixture, a deoxynucleotide mix, and a DNA polymerase are blended to form one or more first polymerase chain reaction mixtures. The method further comprises subjecting the one or more first polymerase chain reaction mixtures to conditions suitable for digesting deoxyuracil (dU)-containing nucleic acid molecules present in the polymerase chain reaction mixtures and for carrying out one or more polymerase chain reaction cycles comprising a denaturation treatment, a hybridization treatment, and an extension treatment, thereby forming first polymerase chain reactions products comprising the bisulfite-treated target nucleotide sequence or a complement thereof. One or more secondary oligonucleotide primer sets are provided. Each secondary oligonucleotide primer set comprises (a) a first secondary oligonucleotide primer comprising the same nucleotide sequence as the 5′ primer-specific portion of the first polymerase chain reaction products or their complements and (b) a second secondary oligonucleotide primer comprising a nucleotide sequence that is complementary to the 3′ primer-specific portion of the first polymerase chain reaction products or their complements. The primary polymerase chain reaction product sequences, the one or more secondary oligonucleotide primer sets, the one or more enzymes capable of digesting deoxyuracil (dU)-containing nucleic acid molecules, a deoxynucleotide mix including dUTP, and a DNA polymerase are blended to form one or more second polymerase chain reaction mixtures. The one or more second polymerase chain reaction mixtures are subjected to conditions suitable for digesting deoxyuracil (dU)-containing nucleic acid molecules present in the second polymerase chain reaction mixtures and for carrying out one or more polymerase chain reaction cycles comprising a denaturation treatment, a hybridization treatment, and an extension treatment thereby forming second polymerase chain reaction products. The method further involves detecting and distinguishing the second polymerase chain reactions products in the one or more second polymerase chain reaction mixtures to identify the presence of one or more parent nucleic acid molecules containing target nucleotide sequences differing from nucleotide sequences in other parent nucleic acid molecules in the sample by one or more methylated residues.

[0034] Another aspect of the present application is directed to a method for identifying in a sample, one or more parent ribonucleic acid molecules containing a target ribonucleic acid sequence differing from ribonucleic acid sequences of other parent ribonucleic acid molecules in the sample due to alternative splicing, alternative transcript, alternative start site, alternative coding sequence, alternative non-coding sequence, exon insertion, exon deletion, intron insertion, translocation, mutation, or other rearrangement at the genome level. The method involves providing a sample containing one or more parent ribonucleic acid molecules containing a target ribonucleic acid molecule potentially differing in sequence from other parent ribonucleic acid molecules and providing one or more enzymes capable of digesting deoxyuracil (dU) containing nucleic acid molecules present in the sample. The sample is contacted with one or more enzymes capable of digesting dU containing nucleic acid molecules potentially present in the sample. One or more primary oligonucleotide primer sets are then provided. Each primary oligonucleotide primer set comprises (a) a first primary oligonucleotide primer that comprises a nucleotide sequence that is complementary to the RNA sequence in the parent ribonucleic acid molecule adjacent to the target ribonucleotide sequence and (b) a second primary oligonucleotide primer that comprises a nucleotide sequence that is complementary to a portion of the cDNA extension product formed from the first primary oligonucleotide primer. The contacted sample, the one or more primary oligonucleotide primer sets, a deoxynucleotide mix including dUTP, a reverse transcriptase, and a DNA polymerase or a DNA polymerase with reverse-transcriptase activity are blended to form one or more reverse-transcription/polymerase chain reaction mixtures. The one or more reverse-transcription/polymerase chain reaction mixtures are subjected to conditions suitable for generating complementary deoxyribonucleic acid (cDNA) molecules to the target ribonucleic nucleic acid and to carry out one or more polymerase chain reaction cycles comprising a denaturation treatment, a hybridization treatment, and an extension treatment thereby forming one or more different reverse transcription/polymerase products. The method further comprises providing one or more oligonucleotide probe sets. Each probe set comprises (a) a first oligonucleotide probe having a 5′ primer-specific portion and a 3′ target sequence-specific portion, and (b) a second oligonucleotide probe having a 5′ target sequence-specific portion and a 3′ primer-specific portion, wherein the first and second oligonucleotide probes of a probe set are configured to hybridize, in a base specific manner, on complementary portions of a reverse transcriptase/polymerase product corresponding to the target ribonucleic acid molecule sequence. The reverse transcriptase/polymerase products are contacted with a ligase and the one or more oligonucleotide probe sets to form one or more ligation reaction mixtures, and the one or more ligation reaction mixtures are subjected to one or more ligation reaction cycles whereby the first and second probes of the one or more oligonucleotide probe sets, when hybridized to their complement, are ligated together to form ligated product sequences in the ligase reaction mixture, wherein each ligated product sequence comprises the 5′ primer-specific portion, the target-specific portions, and the 3′ primer-specific portion. The method further involves providing one or more secondary oligonucleotide primer sets. Each secondary oligonucleotide primer set comprises (a) a first secondary oligonucleotide primer comprising the same nucleotide sequence as the 5′ primer-specific portion of the ligated product sequence and (b) a second secondary oligonucleotide primer comprising a nucleotide sequence that is complementary to the 3′ primer-specific portion of the ligated product sequence. The ligated product sequences, the one or more secondary oligonucleotide primer sets with one or more enzymes capable of digesting deoxyuracil (dU)-containing nucleic acid molecules, a deoxynucleotide mix including dUTP, and a DNA polymerase are blended to form one or more first polymerase chain reaction mixtures, and the one or more first polymerase chain reaction mixtures are subjected to conditions suitable for digesting deoxyuracil (dU)-containing nucleic acid molecules present in the first polymerase chain reaction mixtures and for carrying out one or more polymerase chain reaction cycles comprising a denaturation treatment, a hybridization treatment, and an extension treatment thereby forming first polymerase chain reaction products. The method further comprises detecting and distinguishing the first polymerase chain reaction products, thereby identifying the presence of one or more parent ribonucleic acid molecules containing a target ribonucleic acid sequence differing from ribonucleic acid sequences of other parent ribonucleic acid molecules in the sample due to alternative splicing, alternative transcript, alternative start site, alternative coding sequence, alternative non-coding sequence, exon insertion, exon deletion, intron insertion, translocation, mutation, or other rearrangement at the genome level.

[0035] Another aspect of the present application is directed to a method for identifying in a sample, one or more parent ribonucleic acid molecules containing a target ribonucleic acid sequence differing from ribonucleic acid sequences of other parent ribonucleic acid molecules in the sample due to alternative splicing, alternative transcript, alternative start site, alternative coding sequence, alternative non-coding sequence, exon insertion, exon deletion, intron insertion, translocation, mutation, or other rearrangement at the genome level. The method involves providing a sample containing one or more parent ribonucleic acid molecules containing a target ribonucleic acid molecule potentially differing in sequence from other parent ribonucleic acid molecules and providing one or more enzymes capable of digesting deoxyuracil (dU)-containing nucleic acid molecules present in the sample. The sample is contacted with one or more enzymes capable of digesting dU containing nucleic acid molecules potentially present in the sample. The method further involves providing one or more primary oligonucleotide primer sets, each primary oligonucleotide primer set comprising (a) a first primary oligonucleotide primer that comprises a nucleotide sequence that is complementary to the RNA sequence in the parent ribonucleic acid molecule adjacent to the target nucleotide sequence and (b) a second primary oligonucleotide primer that comprises a nucleotide sequence that is complementary to a portion of the cDNA extension product formed from the first primary oligonucleotide primer. The contacted sample, the one or more primary oligonucleotide primer sets, a deoxynucleotide mix, a reverse transcriptase and a DNA polymerase or a DNA polymerase with reverse-transcriptase activity are blended to form one or more reverse-transcription/polymerase chain reaction mixtures, and the one or more reverse-transcription/polymerase chain reaction mixtures are subjected to conditions suitable for generating complementary deoxyribonucleic acid (cDNA) molecules to the target RNA and to carry out one or more polymerase chain reaction cycles comprising a denaturation treatment, a hybridization treatment, and an extension treatment thereby forming one or more different reverse-transcription/primary polymerase chain reaction products. The method further comprises providing one or more secondary oligonucleotide primer sets. Each secondary oligonucleotide primer set comprises (a) a first secondary oligonucleotide primer having a 3′ portion that is complementary to a portion of a reverse-transcription/primary polymerase chain reaction product formed from the first primary oligonucleotide primer and (b) a second secondary oligonucleotide primer having a 3′ portion that comprises a nucleotide sequence that is complementary to a portion of a reverse-transcription/primary polymerase chain reaction product formed from the first secondary oligonucleotide primer. The reverse-transcription/primary polymerase chain reaction products, the one or more secondary oligonucleotide primer sets, the one or more enzymes capable of digesting deoxyuracil (dU) containing nucleic acid molecules, a deoxynucleotide mix including dUTP, and a DNA polymerase are blended to form one or more first polymerase chain reaction mixtures, and the one or more first polymerase chain reaction mixtures are subjected to conditions suitable for digesting deoxyuracil (dU)-containing nucleic acid molecules present in the first polymerase chain reaction mixtures and for carrying out two or more polymerase chain reaction cycles comprising a denaturation treatment, a hybridization treatment, and an extension treatment thereby forming first polymerase chain reaction products. The method further involves detecting and distinguishing the first polymerase chain reaction products, thereby identifying the presence of one or more parent ribonucleic acid molecules containing a target ribonucleic acid sequences differing from ribonucleic acid sequences of other parent ribonucleic acid molecules in the sample due to alternative splicing, alternative transcript, alternative start site, alternative coding sequence, alternative non-coding sequence, exon insertion, exon deletion, intron insertion, translocation, mutation, or other rearrangement at the genome level.

[0036] Another aspect of the present application is directed to a method for identifying, in a sample, one or more target micro-ribonucleic acid (miRNA) molecules differing in sequence from other miRNA molecules in the sample by one or more bases. The method involves providing a sample containing one or more target miRNA molecules potentially differing in sequence from other miRNA molecules in the sample by one or more bases and providing one or more enzymes capable of digesting deoxyuracil (dU)-containing nucleic acid molecules present in the sample. The sample is contacted with one or more enzymes capable of digesting dU-containing nucleic acid molecules potentially present in the sample, and the contacted sample is blended with a ligase and one or more first oligonucleotide preliminary probes comprising a 5′ phosphate, a 5′ stem-loop portion, an internal primer-specific portion within the loop region, a blocking group, and a 3′ nucleotide sequence that is complementary to a 3′ portion of the target miRNA molecule sequence to form one or more first ligation reaction mixtures. The method further comprises ligating, in the one or more first ligation reaction mixtures, the one or more target miRNA molecules at their 3′ end to the 5′ phosphate of the one or more first oligonucleotide preliminary probes to generate chimeric nucleic acid molecules comprising the target miRNA molecule sequence, if present in the sample, appended to the one or more first oligonucleotide preliminary probes. One or more primary oligonucleotide primer sets are then provided. Each primer set comprises (a) a first primary oligonucleotide primer comprising a nucleotide sequence that is complementary to the internal primer-specific portion of the first oligonucleotide preliminary probe, and (b) a second primary oligonucleotide primer comprising a 5′ primer-specific portion and a 3′ portion, wherein the second primary oligonucleotide primer may be the same or may differ from other second primary oligonucleotide primers in other sets. The one or more first ligation reaction mixtures comprising chimeric nucleic acid molecules, the one or more primary oligonucleotide primer sets, the one or more enzymes capable of digesting deoxyuracil (dU)-containing nucleic acid molecules in the sample, a deoxynucleotide mix including dUTP, and a reverse transcriptase and a DNA polymerase or a DNA polymerase with reverse-transcriptase activity are blended to form one or more reverse-transcription/polymerase chain reaction mixtures. The one or more reverse-transcription/polymerase chain reaction mixtures are subjected to conditions suitable for digesting deoxyuracil (dU)-containing nucleic acid molecules present in the reverse-transcription/polymerase chain reaction mixtures to conditions suitable for generating complementary deoxyribonucleic acid (cDNA) molecules to the chimeric nucleic acid molecules, and to one or more polymerase chain reaction cycles comprising a denaturation treatment, a hybridization treatment, and an extension treatment thereby forming one or more different primary reverse-transcription/polymerase chain reaction products comprising the 5′ primer-specific portion, a nucleotide sequence corresponding to the target miRNA molecule sequence, and the complement of the internal primer-specific portion, and complements thereof. The method further involves providing one or more oligonucleotide probe sets. Each probe set comprises (a) a first oligonucleotide probe having a 5′ primer-specific portion and a 3′ target sequence-specific portion, and (b) a second oligonucleotide probe having a 5′ target sequence-specific portion, a portion complementary to a primary extension product, and a 3′ primer-specific portion, wherein the first and second oligonucleotide probes of a probe set are configured to hybridize, in a base specific manner, on complementary portions of a primary reverse-transcription/polymerase chain reaction product corresponding to the target miRNA molecule sequence, or complement thereof. The primary reverse-transcription/polymerase chain reaction products are contacted with a ligase and the one or more oligonucleotide probe sets to form one or more second ligation reaction mixtures, and the one or more second ligation reaction mixtures are subjected to one or more ligation reaction cycles whereby the first and second oligonucleotide probes of the one or more oligonucleotide probe sets, when hybridized to their complement, are ligated together to form ligated product sequences in the ligation reaction mixture, wherein each ligated product sequence comprises the 5′ primer-specific portion, the target-specific portions, and the 3′ primer-specific portion. The method further involves providing one or more secondary oligonucleotide primer sets. Each secondary oligonucleotide primer set comprises (a) a first secondary oligonucleotide primer comprising the same nucleotide sequence as the 5′ primer-specific portion of the ligated product sequence and (b) a second secondary oligonucleotide primer comprising a nucleotide sequence that is complementary to the 3′ primer-specific portion of the ligated product sequence. The ligated product sequences and the one or more secondary oligonucleotide primer sets are blended with one or more enzymes capable of digesting deoxyuracil (dU)-containing nucleic acid molecules, a deoxynucleotide mix including dUTP, and a DNA polymerase to form one or more second polymerase chain reaction mixtures. The one or more second polymerase chain reaction mixtures are subjected to conditions suitable for digesting deoxyuracil (dU)-containing nucleic acid molecules present in the second polymerase chain reaction mixtures and for carrying out one or more polymerase chain reaction cycles comprising a denaturation treatment, a hybridization treatment, and an extension treatment thereby forming secondary polymerase chain reaction products. The method further comprises detecting and distinguishing the secondary polymerase chain reaction products in the one or more reactions thereby identifying one or more target miRNA molecules differing in sequence from other miRNA molecules in the sample by one or more bases.

[0037] Another aspect of the present application is directed to a method for identifying, in a sample, one or more target micro-ribonucleic acid (miRNA) molecules differing in sequence from other miRNA molecules in the sample by one or more bases. The method involves providing a sample containing one or more target miRNA molecules potentially differing in sequence from other miRNA molecules in the sample by one or more bases and providing one or more enzymes capable of digesting deoxyuracil (dU)-containing nucleic acid molecules present in the sample. The sample is contacted with one or more enzymes capable of digesting dU-containing nucleic acid molecules potentially present in the sample, and the contacted sample is blended with a ligase and one or more first oligonucleotide probes comprising a 5′ phosphate, a 5′ stem-loop portion, an internal primer-specific portion within the loop region, a blocking group, and a 3′ nucleotide sequence that is complementary to a 3′ portion of the target miRNA molecule sequence to form one or more ligation reaction mixtures. The method further involves ligating, in the one or more ligation reaction mixtures, the one or more target miRNA molecules at their 3′ end to the 5′ phosphate of the one or more first oligonucleotide probes to generate chimeric nucleic acid molecules comprising the target miRNA molecule sequence, if present in the sample, appended to the one or more first oligonucleotide probes. One or more primary oligonucleotide primer sets are then provided. Each primer set comprises (a) a first primary oligonucleotide primer comprising a nucleotide sequence that is complementary to the internal primer-specific portion of the first oligonucleotide probe, and (b) a second primary oligonucleotide primer comprising a 5′ primer-specific portion and a 3′ portion, wherein the second primary oligonucleotide primer may be the same or may differ from other second primary oligonucleotide primers in other sets. The one or more ligation reaction mixtures comprising chimeric nucleic acid molecules, the one or more primary oligonucleotide primer sets, a deoxynucleotide mix, and a reverse transcriptase and a DNA polymerase or a DNA polymerase with reverse-transcriptase activity are blended to form one or more reverse-transcription/polymerase chain reaction mixtures. The one or more reverse-transcription/polymerase chain reaction mixtures are subjected to conditions suitable for generating complementary deoxyribonucleic acid (cDNA) molecules to the chimeric nucleic acid molecules, and to one or more polymerase chain reaction cycles comprising a denaturation treatment, a hybridization treatment, and an extension treatment thereby forming one or more different primary reverse-transcription/polymerase chain reaction products comprising the 5′ primer-specific portion, a nucleotide sequence corresponding to the target miRNA molecule sequence, and the complement of the internal primer-specific portion, and complements thereof. The method further comprises providing one or more secondary oligonucleotide primer sets. Each secondary oligonucleotide primer set comprises (a) a first secondary oligonucleotide primer having a 5′ primer-specific portion and a 3′ portion that is complementary to a portion of an extension product formed from the first primary oligonucleotide primer and (b) a second secondary oligonucleotide primer having a 5′ primer-specific portion and a 3′ portion that comprises a nucleotide sequence that is complementary to a portion of an extension product formed from the first secondary oligonucleotide primer. The primary reverse-transcription/polymerase chain reaction products, the one or more secondary oligonucleotide primer sets, a deoxynucleotide mix, and a DNA polymerase are blended to form one or more first polymerase chain reaction mixtures, and the one or more first polymerase chain reaction mixtures are subjected to conditions suitable for two or more polymerase chain reaction cycles comprising a denaturation treatment, a hybridization treatment, and an extension treatment, thereby forming first polymerase chain reaction products comprising a 5′ primer-specific portion of the first secondary oligonucleotide primer, a nucleotide sequence corresponding to the target miRNA molecule sequence or a complement thereof, and a complement of the other 5′ primer-specific portion second secondary oligonucleotide primer. The method further involves providing one or more tertiary oligonucleotide primer sets. Each tertiary oligonucleotide primer set comprises (a) a first tertiary oligonucleotide primer comprising the same nucleotide sequence as the 5′ primer-specific portion of the first polymerase chain reaction products or their complements and (b) a second tertiary oligonucleotide primer comprising a nucleotide sequence that is complementary to the 3′ primer-specific portion of the first polymerase chain reaction products or their complements. The first polymerase chain reaction process products, the one or more tertiary oligonucleotide primer sets, the one or more enzymes capable of digesting deoxyuracil (dU)-containing nucleic acid molecules, a deoxynucleotide mix including dUTP, and a DNA polymerase are blended to form one or more second polymerase chain reaction mixtures, and the one or more second polymerase chain reaction mixtures are subjected to conditions suitable for digesting deoxyuracil (dU) containing nucleic acid molecules present in the second polymerase chain reaction mixtures and for carrying out one or more polymerase chain reaction cycles comprising a denaturation treatment, a hybridization treatment, and an extension treatment thereby forming second polymerase chain reaction products. The method further comprises detecting and distinguishing the second polymerase chain reaction products, thereby identifying one or more target miRNA molecules differing in sequence from other miRNA molecules in the sample by one or more bases.

[0038] Another aspect of the present application is directed to a method for identifying, in a sample, one or more target micro-ribonucleic acid (miRNA) molecules differing in sequence from other miRNA molecules in the sample by one or more bases. The method involves providing a sample containing one or more target miRNA molecules potentially differing in sequence from other miRNA molecules in the sample by one or more bases and providing one or more enzymes capable of digesting deoxyuracil (dU)-containing nucleic acid molecules present in the sample. The sample is contacted with one or more enzymes capable of digesting dU-containing nucleic acid molecules potentially present in the sample. The contacted sample is blended with ATP and a Poly(A) polymerase to form a Poly(A) polymerase reaction mixture, and the Poly(A) polymerase reaction mixture is subjected to conditions suitable for appending homopolymer A to the 3′ ends of the one or more target miRNA molecules potentially present in the sample. The method further involves providing one or more primary oligonucleotide primer sets. Each primer set comprises (a) a first primary oligonucleotide primer comprising a 5′ primer-specific portion, an internal poly dT portion, and a 3′ portion comprising from 1 to 10 bases complementary to the 3′ end of the target miRNA, wherein the first primary oligonucleotide primer may be the same or may differ from other first primary oligonucleotide primers in other sets, and (b) a second primary oligonucleotide primer comprising a 5′ primer-specific portion and a 3′ portion, wherein the second primary oligonucleotide primer may be the same or may differ from other second primary oligonucleotide primers in other sets. The Poly(A) polymerase reaction mixture, the one or more primary oligonucleotide primer sets, the one or more enzymes capable of digesting deoxyuracil (dU)-containing nucleic acid molecules in the sample, a deoxynucleotide mix including dUTP, and a reverse transcriptase and a DNA polymerase or a DNA polymerase with reverse-transcriptase activity are blended to form one or more reverse-transcription/polymerase chain reaction mixtures. The one or more reverse-transcription/polymerase chain reaction mixtures are subjected to conditions suitable for digesting deoxyuracil (dU)-containing nucleic acid molecules present in the reverse-transcription/polymerase chain reaction mixtures, then to conditions suitable for generating complementary deoxyribonucleic acid (cDNA) molecules to the target miRNA sequences with 3′ polyA tails, and to one or more polymerase chain reaction cycles comprising a denaturation treatment, a hybridization treatment, and an extension treatment thereby forming one or more different reverse-transcription/polymerase chain reaction products comprising the 5′ primer-specific portion of the second primary oligonucleotide primer, a nucleotide sequence corresponding to the target miRNA molecule sequence, a poly dA region, and the complement of the 5′ primer-specific portion of the first primary oligonucleotide primer, and complements thereof. The method further comprises providing one or more oligonucleotide probe sets. Each probe set comprises (a) a first oligonucleotide probe having a 5′ primer-specific portion and a 3′ target sequence-specific portion, and (b) a second oligonucleotide probe having a 5′ target sequence-specific portion, a portion complementary to the one or more reverse-transcription/polymerase chain reaction products, and a 3′ primer-specific portion, wherein the first and second oligonucleotide probes of a probe set are configured to hybridize, in a base specific manner, to complementary portions of the one or more reverse-transcription/polymerase chain reaction products corresponding to the target miRNA molecule sequence, or complement thereof. The one or more reverse-transcription/polymerase chain reaction products are contacted with a ligase and the one or more oligonucleotide probe sets to form one or more ligation reaction mixtures, and the one or more ligation reaction mixtures are subjected to one or more ligation reaction cycles whereby the first and second oligonucleotide probes of the one or more oligonucleotide probe sets, when hybridized to their complement, are ligated together to form ligated product sequences in the ligation reaction mixture, wherein each ligated product sequence comprises the 5′ primer-specific portion, the target-specific portions, and the 3′ primer-specific portion. The method further involves providing one or more secondary oligonucleotide primer sets. Each secondary oligonucleotide primer set comprises (a) a first secondary oligonucleotide primer comprising the same nucleotide sequence as the 5′ primer-specific portion of the ligated product sequence and (b) a second secondary oligonucleotide primer comprising a nucleotide sequence that is complementary to the 3′ primer-specific portion of the ligated product sequence. The ligated product sequences and the one or more secondary oligonucleotide primer sets are blended with one or more enzymes capable of digesting deoxyuracil (dU)-containing nucleic acid molecules, a deoxynucleotide mix including dUTP, and a DNA polymerase to form one or more first polymerase chain reaction mixtures, and the one or more first polymerase chain reaction mixtures are subjected to conditions suitable for digesting deoxyuracil (dU)-containing nucleic acid molecules present in the first polymerase chain reaction mixtures and for carrying out one or more polymerase chain reaction cycles comprising a denaturation treatment, a hybridization treatment, and an extension treatment thereby forming secondary polymerase chain reaction products. The method further comprises detecting and distinguishing the secondary polymerase chain reaction products, thereby identifying one or more target miRNA molecules differing in sequence from other miRNA molecules in the sample by one or more bases.

[0039] Another aspect of the present application is directed to a method for identifying, in a sample, one or more target micro-ribonucleic acid (miRNA) molecules differing in sequence from other miRNA molecules in the sample by one or more bases. The method involves providing a sample containing one or more target miRNA molecules potentially differing in sequence from other miRNA molecules in the sample by one or more bases and providing one or more enzymes capable of digesting deoxyuracil (dU)-containing nucleic acid molecules present in the sample. The sample is contacted with one or more enzymes capable of digesting dU-containing nucleic acid molecules potentially present in the sample. The contacted sample is blended with ATP and a Poly(A) polymerase to form a Poly(A) polymerase reaction mixture, and the Poly(A) polymerase reaction mixture is subjected to conditions suitable for appending a homopolymer A to the 3′ ends of the one or more target miRNA molecules potentially present in the sample. The method further involves providing one or more primary oligonucleotide primer sets. Each primer set comprises (a) a first primary oligonucleotide primer comprising a 5′ primer-specific portion, an internal poly dT portion, and a 3′ portion comprising from 1 to 10 bases complementary to the 3′ end of the target miRNA, wherein the first primary oligonucleotide primer may be the same or may differ from other first primary oligonucleotide primers in other sets, and (b) a second primary oligonucleotide primer comprising a 5′ primer-specific portion and a 3′ portion, wherein the second primary oligonucleotide primer may be the same or may differ from other second primary oligonucleotide primers in other sets. The Poly(A) polymerase reaction mixture potentially comprising target miRNA sequences is blended with 3′ polyA tails, the one or more primary oligonucleotide primer sets, a deoxynucleotide mix, and a reverse transcriptase and a DNA polymerase or a DNA polymerase with reverse-transcriptase activity to form one or more reverse-transcription/polymerase chain reaction mixtures. The one or more reverse-transcription/polymerase chain reaction mixtures are subjected to conditions suitable for generating complementary deoxyribonucleic acid (cDNA) molecules to the target miRNA sequences with 3′ polyA tails, and to one or more polymerase chain reaction cycles comprising a denaturation treatment, a hybridization treatment, and an extension treatment, thereby forming one or more different reverse-transcription/polymerase chain reaction products comprising the 5′ primer-specific portion of the second primary oligonucleotide primer, a nucleotide sequence corresponding to the target miRNA molecule sequence, a poly dA region, and the complement of the 5′ primer-specific portion of the first primary oligonucleotide primer, and complements thereof. The method further comprises providing one or more secondary oligonucleotide primer sets. Each secondary oligonucleotide primer set comprises (a) a first secondary oligonucleotide primer having a 5′ primer-specific portion and a 3′ portion that is complementary to a portion of a reverse-transcription/polymerase chain reaction product formed from the first primary oligonucleotide primer and (b) a second secondary oligonucleotide primer having a 5′ primer-specific portion and a 3′ portion that comprises a nucleotide sequence that is complementary to a portion of a reverse-transcription/polymerase chain reaction product formed from the first secondary oligonucleotide primer. The reverse-transcription/polymerase chain reaction products, the one or more secondary oligonucleotide primer sets, a deoxynucleotide mix, and a DNA polymerase are blended to form one or more first polymerase chain reaction mixtures, and the one or more first polymerase chain reaction mixtures are subjected to conditions suitable for two or more polymerase chain reaction cycles comprising a denaturation treatment, a hybridization treatment, and an extension treatment, thereby forming first polymerase chain reaction products comprising a 5′ primer-specific portion, a nucleotide sequence corresponding to the target miRNA molecule sequence or a complement thereof, and a complement of the other 5′ primer-specific portion. The method further involves providing one or more tertiary oligonucleotide primer sets. Each tertiary oligonucleotide primer set comprises (a) a first tertiary oligonucleotide primer comprising the same nucleotide sequence as the 5′ primer-specific portion of the first polymerase chain reaction product sequence and (b) a second tertiary oligonucleotide primer comprising a nucleotide sequence that is complementary to the 3′ primer-specific portion of the first polymerase chain reaction product sequence. The first polymerase chain reaction products, the one or more tertiary oligonucleotide primer sets, the one or more enzymes capable of digesting deoxyuracil (dU) containing nucleic acid molecules, a deoxynucleotide mix including dUTP, and a DNA polymerase are blended to form one or more second polymerase chain reaction mixtures. The one or more second polymerase chain reaction mixtures are subjected to conditions suitable for digesting deoxyuracil (dU)-containing nucleic acid molecules present in the first polymerase chain reaction mixtures, and one or more polymerase chain reaction cycles comprising a denaturation treatment, a hybridization treatment, and an extension treatment thereby forming second polymerase chain reaction products. The method further comprises detecting and distinguishing the second polymerase chain reaction products in the one or more reactions thereby identifying one or more target miRNA molecules differing in sequence from other miRNA molecules in the sample by one or more bases.

[0040] Another aspect of the present application is directed to a method of diagnosing or prognosing a disease state of cells or tissue based on identifying the presence or level of a plurality of disease-specific and/or cell/tissue-specific DNA, RNA, and/or protein markers in a biological sample of an individual. The plurality of markers is in a set comprising from 6-12 markers, 12-24 markers, 24-36 markers, 36-48 markers, 48-72 markers, 72-96 markers, or >96 markers. Each marker in a given set is selected by having any one or more of the following criteria: present, or above a cutoff level, in >50% of biological samples of the disease cells or tissue from individuals diagnosed with the disease state; absent, or below a cutoff level, in >95% of biological samples of the normal cells or tissue from individuals without the disease state; present, or above a cutoff level, in >50% of biological samples comprising cells, serum, blood, plasma, amniotic fluid, sputum, urine, bodily fluids, bodily secretions, bodily excretions, or fractions thereof, from individuals diagnosed with the disease state; absent, or below a cutoff level, in >95% of biological samples comprising cells, serum, blood, plasma, amniotic fluid, sputum, urine, bodily fluids, bodily secretions, bodily excretions, or fractions thereof, from individuals without the disease state; present with a z-value of >1.65 in the biological sample comprising cells, serum, blood, plasma, amniotic fluid, sputum, urine, bodily fluids, bodily secretions, bodily excretions, or fractions thereof, from individuals diagnosed with the disease state. At least 50% of the markers in a set each comprise one or more methylated residues, and/or at least 50% of the markers in a set that are present, or above a cutoff level, or present with a z-value of >1.65, comprise of one or more methylated residues, in the biological sample comprising cells, serum, blood, plasma, amniotic fluid, sputum, urine, bodily fluids, bodily secretions, bodily excretions, or fractions thereof, from at least 50% of individuals diagnosed with the disease state. The method involves obtaining a biological sample. The biological sample includes cell-free DNA, RNA, and/or protein originating from the cells or tissue and from one or more other tissues or cells, and the biological sample is selected from the group consisting of cells, serum, blood, plasma, amniotic fluid, sputum, urine, bodily fluids, bodily secretions, and bodily excretions, or fractions thereof. The sample is fractionated into one or more fractions, wherein at least one fraction comprises exosomes, tumor-associated vesicles, other protected states, or cell-free DNA, RNA, and/or protein. Nucleic acid molecules in the one or more fractions are subjected to a bisulfite treatment under conditions suitable to convert unmethylated cytosine residues to uracil residues. At least two enrichment steps are carried out for 50% or more disease-specific and/or cell/tissue-specific DNA, RNA, and/or protein markers during either said fractionating and/or by carrying out a nucleic acid amplification step. The method further involves performing one or more assays to detect and distinguish the plurality of disease-specific and/or cell/tissue-specific DNA, RNA, and/or protein markers, thereby identifying their presence or levels in the sample, wherein individuals are diagnosed or prognosed with the disease state if a minimum of 2 or 3 markers are present or are above a cutoff level in a marker set comprising from 6-12 markers; or a minimum of 3, 4, or 5 markers are present or are above a cutoff level in a marker set comprising from 12-24 markers; or a minimum of 3, 4, 5, or 6 markers are present or are above a cutoff level in a marker set comprising from 24-36 markers; or a minimum of 4, 5, 6, 7, or 8 markers are present or are above a cutoff level in a marker set comprising from 36-48 markers; or a minimum of 6, 7, 8, 9, 10, 11, or 12 markers are present or are above a cutoff level in a marker set comprising from 48-72 markers, or a minimum of 7, 8, 9, 10, 11, 12 or 13 markers are present or are above a cutoff level in a marker set comprising from 72-96 markers, or a minimum of 8, 9, 10, 11, 12, 13 or “n”/12 markers are present or are above a cutoff level in a marker set comprising 96−“n” markers, when “n”>168 markers.

[0041] Another aspect of the present application is directed to a method of diagnosing or prognosing a disease state of a solid tissue cancer including colorectal adenocarcinoma, stomach adenocarcinoma, esophageal carcinoma, breast lobular and ductal carcinoma, uterine corpus endometrial carcinoma, ovarian serous cystadenocarcinoma, cervical squamous cell carcinoma and adenocarcinoma, uterine carcinosarcoma, lung adenocarcinoma, lung squamous cell carcinoma, head & neck squamous cell carcinoma, prostate adenocarcinoma, invasive urothelial bladder cancer, liver hepatoceullular carcinoma, pancreatic ductal adenocarcinoma, or gallbladder adenocarcinoma based on identifying the presence or level of a plurality of disease-specific and/or cell/tissue-specific DNA, RNA, and/or protein markers in a biological sample of an individual. The plurality of markers is in a set comprising from 48-72 total cancer markers, 72-96 total cancer markers or ≥96 total cancer markers, wherein on average greater than one quarter such markers in a given set cover each of the aforementioned major cancers being tested. Each marker in a given set for a given solid tissue cancer is selected by having any one or more of the following criteria for that solid tissue cancer: present, or above a cutoff level, in >50% of biological samples of a given cancer tissue from individuals diagnosed with a given solid tissue cancer; absent, or below a cutoff level, in >95% of biological samples of the normal tissue from individuals without that given solid tissue cancer; present, or above a cutoff level, in >50% of biological samples comprising cells, serum, blood, plasma, amniotic fluid, sputum, urine, bodily fluids, bodily secretions, bodily excretions, or fractions thereof, from individuals diagnosed with a given solid tissue cancer; absent, or below a cutoff level, in >95% of biological samples comprising cells, serum, blood, plasma, amniotic fluid, sputum, urine, bodily fluids, bodily secretions, bodily excretions, or fractions thereof, from individuals without that given solid tissue cancer; present with a z-value of >1.65 in the biological sample comprising cells, serum, blood, plasma, amniotic fluid, sputum, urine, bodily fluids, bodily secretions, bodily excretions, or fractions thereof, from individuals diagnosed with a given solid tissue cancer. At least 50% of the markers in a set each comprise one or more methylated residues, and/or at least 50% of the markers in a set that are present, or above a cutoff level, or present with a z-value of >1.65, comprise of one or more methylated residues, in the biological sample comprising cells, serum, blood, plasma, amniotic fluid, sputum, urine, bodily fluids, bodily secretions, bodily excretions, or fractions thereof, from at least 50% of individuals diagnosed with a given solid tissue cancer. The method involves obtaining a biological sample including cell-free DNA, RNA, and/or protein originating from the cells or tissue and from one or more other tissues or cells, wherein the biological sample is selected from the group consisting of cells, serum, blood, plasma, amniotic fluid, sputum, urine, bodily fluids, bodily secretions, and bodily excretions, or fractions thereof. The sample is fractionated into one or more fractions, wherein at least one fraction comprises exosomes, tumor-associated vesicles, other protected states, or cell-free DNA, RNA, and/or protein. The nucleic acid molecules in the one or more fractions are subjected to a bisulfite treatment under conditions suitable to convert unmethylated cytosine residues to uracil residues. At least two enrichment steps are carried out for 50% or more of the given solid tissue cancer-specific and/or cell/tissue-specific DNA, RNA, and/or protein markers during either said fractionating and/or by carrying out a nucleic acid amplification step. The method further involves performing one or more assays to detect and distinguish the plurality of cancer-specific and/or cell/tissue-specific DNA, RNA, and/or protein markers, thereby identifying their presence or levels in the sample, wherein individuals are diagnosed or prognosed with the a solid-tissue cancer if a minimum of 4 markers are present or are above a cutoff level in a marker set comprising from 48-72 total cancer markers; or a minimum of 5 markers are present or are above a cutoff level in a marker set comprising from 72-96 total cancer markers; or a minimum of 6 or “n”/18 markers are present or are above a cutoff level in a marker set comprising 96 to “n” total cancer markers, when “n”>96 total cancer markers.

[0042] Another aspect of the present application is directed to a method of diagnosing or prognosing a disease state of and identifying the most likely specific tissue(s) of origin of a solid tissue cancer in the following groups: Group 1 (colorectal adenocarcinoma, stomach adenocarcinoma, esophageal carcinoma); Group 2 (breast lobular and ductal carcinoma, uterine corpus endometrial carcinoma, ovarian serous cystadenocarcinoma, cervical squamous cell carcinoma and adenocarcinoma, uterine carcinosarcoma); Group 3 (lung adenocarcinoma, lung squamous cell carcinoma, head & neck squamous cell carcinoma); Group 4 (prostate adenocarcinoma, invasive urothelial bladder cancer); and/or Group 5 (liver hepatoceullular carcinoma, pancreatic ductal adenocarcinoma, or gallbladder adenocarcinoma) based on identifying the presence or level of a plurality of disease-specific and/or cell/tissue-specific DNA, RNA, and/or protein markers in a biological sample of an individual, wherein the plurality of markers is in a set comprising from 36-48 group-specific cancer markers, 48-64 group-specific cancer markers, or 64 group-specific cancer markers, wherein on average greater than one third of such markers in a given set cover each of the aforementioned cancers being tested within that group. Each marker in a given set for a given solid tissue cancer is selected by having any one or more of the following criteria for that solid tissue cancer: present, or above a cutoff level, in >50% of biological samples of a given cancer tissue from individuals diagnosed with a given solid tissue cancer; absent, or below a cutoff level, in >95% of biological samples of the normal tissue from individuals without that given solid tissue cancer; present, or above a cutoff level, in >50% of biological samples comprising cells, serum, blood, plasma, amniotic fluid, sputum, urine, bodily fluids, bodily secretions, bodily excretions, or fractions thereof, from individuals diagnosed with a given solid tissue cancer; absent, or below a cutoff level, in >95% of biological samples comprising cells, serum, blood, plasma, amniotic fluid, sputum, urine, bodily fluids, bodily secretions, bodily excretions, or fractions thereof, from individuals without that given solid tissue cancer; present with a z-value of >1.65 in the biological sample comprising cells, serum, blood, plasma, amniotic fluid, sputum, urine, bodily fluids, bodily secretions, bodily excretions, or fractions thereof, from individuals diagnosed with a given solid tissue cancer. At least 50% of the markers in a set each comprise one or more methylated residues, and/or at least 50% of the markers in a set that are present, or above a cutoff level, or present with a z-value of >1.65 comprise one or more methylated residues, in the biological sample comprising cells, serum, blood, plasma, amniotic fluid, sputum, urine, bodily fluids, bodily secretions, bodily excretions, or fractions thereof, from at least 50% of individuals diagnosed with a given solid tissue cancer. The method involves obtaining the biological sample. The biological sample includes cell-free DNA, RNA, and/or protein originating from the cells or tissue and from one or more other tissues or cells, wherein the biological sample is selected from the group consisting of cells, serum, blood, plasma, amniotic fluid, sputum, urine, bodily fluids, bodily secretions, and bodily excretions, or fractions thereof. The sample is fractionated into one or more fractions, wherein at least one fraction comprises exosomes, tumor-associated vesicles, other protected states, or cell-free DNA, RNA, and/or protein. The nucleic acid molecules in the one or more fractions are subjected to a bisulfite treatment under conditions suitable to convert unmethylated cytosine residues to uracil residues. At least two enrichment steps are carried out for 50% or more of the given solid tissue cancer-specific and/or cell/tissue-specific DNA, RNA, and/or protein markers during either said fractionating and/or by carrying out a nucleic acid amplification step. The method further involves performing one or more assays to detect and distinguish the plurality of cancer-specific and/or cell/tissue-specific DNA, RNA, and/or protein markers, thereby identifying their presence or levels in the sample, wherein individuals are diagnosed or prognosed with a solid-tissue cancer if a minimum of 4 markers are present or are above a cutoff level in a marker set comprising from 36-48 group-specific cancer markers; or a minimum of 5 markers are present or are above a cutoff level in a marker set comprising from 48-64 group-specific cancer markers; or a minimum of 6 or “n”/12 markers are present or are above a cutoff level in a marker set comprising 64 to “n” total cancer markers, when “n”>64 group-specific cancer markers.

[0043] The present application describes a number of approaches for detecting mutations, expression, splice variant, translocation, copy number, and/or methylation changes in target nucleic acid molecules using nuclease, ligase, and polymerase reactions. The present application solves the problems of carry over prevention, as well as allowing for spatial multiplexing to provide relative quantification, similar to digital PCR. Such technology may be utilized for non-invasive early detection of cancer, non-invasive prognosis of cancer, and monitoring for cancer recurrence from plasma or serum samples.

[0044] The present application provides a comprehensive roadmap of nucleic acid methylation, miRNA, lncRNA, ncRNA, mRNA Exons, as well as cancer-associated protein markers that are specific for solid-tissue cancers and matched normal tissues. The present application teaches the art of selecting the desired number of markers and types of markers for both pan-oncology and specific cancers (i.e. colorectal cancer) to guide the physician to improve the treatment of the patient. Details on primer design and optimized primer sequences are provided to enable rapid validation of these tests for both pan-oncology and specific cancers. The two-step procedure is designed to cast a wide net to initially identify most of the individuals harboring an early cancer, followed by a more stringent second step to improve specificity and narrow the patients to those most likely to harbor a hidden cancer, who are then sent for imaging and followup. The advantage of this 2-step approach is that it not only identifies the potential tissue of origin, but it is designed to provide the highest positive predictive value (PPV). Thus, when a result for a rare cancer comes back as presumptive positive (i.e. early ovarian cancer) the physician can focus her attention on providing imaging and followup to those patients who need it the most, while the test minimizes the false-positives that create unnecessary anxiety and unwanted invasive procedures.

[0045] The present application provides robust approaches for detecting markers of cancer (mutations, expression, splice variant, translocation, copy number, and/or methylation changes) using either qPCR or dPCR readout using protocols that are amenable to automation and work on readily available commercial instruments. The approach provides advantages in being integrated and convenient for laboratory setup, allowing for cost reduction, scalability, and fit with medical and laboratory flow in a CLIA-compatible automated setting. The benefit in lives saved world-wide would be of incalculable value.

### BRIEF DESCRIPTION OF THE DRAWINGS

[0046] FIG. 1A-B illustrates a conditional logic tree for an early detection colorectal cancer test based on analysis of a patient's blood sample. FIG. 1A illustrates a one-step colorectal cancer assay using 24 markers at average sensitivity of 50%. FIG. 1B illustrates a two-step colorectal cancer assay using 24 markers in the first step at average sensitivity of 50%, and 48 markers in a second step. FIGS. 1C-D illustrate a conditional logic tree for a two-step assay for early detection pan-oncology pan-oncology cancer test based on analysis of a patient's blood sample. FIG. 1C illustrates a two-step pan-oncology assay using 96 group-specific markers at average sensitivity of 50% in the first step, followed by 1 or 2 groups of 64 type-specific markers each at average sensitivity of 50% in the second step. FIG. 1D illustrates a two-step pan-oncology assay using 96 group-specific markers at average sensitivity of 66% in the first step, followed by 1 or 2 groups of 64 type-specific markers each at average sensitivity of 66% in the second step.

[0047] FIG. 2 illustrates exPCR-LDR-qPCR carryover prevention reaction with Taqman™ detection to identify or relatively quantify target(s) and/or low-level mutations.

[0048] FIG. 3 illustrates exPCR-LDR-qPCR carryover prevention reaction with UniTaq detection to identify or relatively quantify target(s) and/or low-level mutations.

[0049] FIG. 4 illustrates exPCR-qPCR carryover prevention reaction with Taqman™ detection to identify or relatively quantify target(s) and/or low-level mutations.

[0050] FIG. 5 illustrates exPCR-qPCR carryover prevention reaction with UniTaq detection to identify or relatively quantify target(s) and/or low-level mutations.

[0051] FIG. 6 illustrates a variation of exPCR-qPCR carryover prevention reaction with Taqman™ detection to identify or relatively quantify target(s) and/or low-level mutations.

[0052] FIG. 7 illustrates another variation of exPCR-qPCR carryover prevention reaction with Taqman™ detection to identify or relatively quantify target(s) and/or low-level mutations.

[0053] FIG. 8 illustrates a variation of exPCR-qPCR carryover prevention reaction with UniTaq detection to identify or relatively quantify target(s) and/or low-level mutations.

[0054] FIG. 9 illustrates exPCR-LDR-qPCR carryover prevention reaction with Taqman™ detection to identify or relatively quantify low-level methylation.

[0055] FIG. 10 illustrates a variation of exPCR-LDR-qPCR carryover prevention reaction with Taqman™ detection to identify or relatively quantify low-level methylation.

[0056] FIG. 11 illustrates exPCR-qPCR carryover prevention reaction with Taqman™ detection to identify or relatively quantify low-level methylation.

[0057] FIG. 12 illustrates a variation of exPCR-qPCR carryover prevention reaction with Taqman™ detection to identify or relatively quantify low-level methylation.

[0058] FIG. 13 illustrates another variation of exPCR-qPCR carryover prevention reaction with Taqman™ detection to identify or relatively quantify low-level methylation.

[0059] FIG. 14 illustrates another variation of exPCR-qPCR carryover prevention reaction with Taqman™ detection to identify or relatively quantify low-level methylation.

[0060] FIG. 15 illustrates another variation of exPCR-qPCR carryover prevention reaction with Taqman™ detection to identify or relatively quantify low-level methylation.

[0061] FIG. 16 illustrates another variation of exPCR-LDR-qPCR carryover prevention reaction with Taqman™ detection to identify or relatively quantify low-level methylation.

[0062] FIG. 17 illustrates another variation of exPCR-LDR-qPCR carryover prevention reaction with Taqman™ detection to identify or relatively quantify low-level methylation.

[0063] FIG. 18 illustrates another variation of exPCR-qPCR carryover prevention reaction with Taqman™ detection to identify or relatively quantify low-level methylation.

[0064] FIG. 19 illustrates another variation of exPCR-qPCR carryover prevention reaction with Taqman™ detection to identify or relatively quantify low-level methylation.

[0065] FIG. 20 illustrates another variation of exPCR-qPCR carryover prevention reaction with Taqman™ detection to identify or relatively quantify low-level methylation.

[0066] FIG. 21 illustrates another variation of exPCR-qPCR carryover prevention reaction with Taqman™ detection to identify or relatively quantify low-level methylation.

[0067] FIG. 22 illustrates another variation of exPCR-qPCR carryover prevention reaction with Taqman™ detection to identify or relatively quantify low-level methylation.

[0068] FIG. 23 illustrates RT-PCR-LDR-qPCR carryover prevention reaction with Taqman™ detection to detect and enumerate translocation events at the mRNA level.

[0069] FIG. 24 illustrates RT-PCR-qPCR carryover prevention reaction with Taqman™ detection to detect and enumerate translocation events at the mRNA level.

[0070] FIG. 25 illustrates RT-PCR-PCR-qPCR carryover prevention reaction with Taqman™ detection to detect and enumerate translocation events at the mRNA level.

[0071] FIG. 26 illustrates RT-PCR-LDR-qPCR carryover prevention reaction with Taqman™ detection to detect and enumerate RNA copy number.

[0072] FIG. 27 illustrates RT-PCR-qPCR carryover prevention reaction with Taqman™ detection to detect and enumerate RNA copy number.

[0073] FIG. 28 illustrates RT-PCR-PCR-qPCR carryover prevention reaction with Taqman™ detection to detect and enumerate RNA copy number.

[0074] FIG. 29 illustrates Ligation-RT-PCR-LDR-qPCR carryover prevention reaction with Taqman™ detection to detect and enumerate miRNA.

[0075] FIG. 30 illustrates Ligation-RT-PCR-qPCR carryover prevention reaction with Taqman™ detection to detect and enumerate miRNA.

[0076] FIG. 31 illustrates RT-PCR-LDR-qPCR carryover prevention reaction with Taqman™ detection to detect and enumerate miRNA.

[0077] FIG. 32 illustrates RT-PCR-qPCR carryover prevention reaction with Taqman™ detection to detect and enumerate miRNA.

[0078] FIGS. 33A-B illustrate results for calculated overall Sensitivity and Specificity for a 24-marker assay, where the average individual marker sensitivity is 50% (FIG. 33A), and the average individual marker false-positive rate is from 2% to 5% (FIG. 33B).

[0079] FIGS. 34A-B illustrate results for calculated overall Sensitivity and Specificity for a 36-marker assay, where the average individual marker sensitivity is 50% (FIG. 34A), and the average individual marker false-positive rate is from 2% to 5% (FIG. 34B).

[0080] FIGS. 35A-B illustrate results for calculated overall Sensitivity and Specificity for a 48-marker assay, where the average individual marker sensitivity is 50% (FIG. 35A), and the average individual marker false-positive rate is from 2% to 5% (FIG. 35B).

[0081] FIGS. 36A-B illustrate results for calculated overall Sensitivity and Specificity for a 96-marker assay, where the average individual marker sensitivity is 50% (FIG. 36A), and the average individual marker false-positive rate is from 2% to 5% (FIG. 36B).

[0082] FIGS. 37A-B illustrate the ROC curve for a 48-marker assay, where the average individual marker sensitivity is 50%, as well as the calculated AUC, when the average number of molecules per marker in the blood ranges from 150 to 600 molecules. For FIGS. 37A and 37B, the calculations are based on an average individual marker false-positive rate of 2% and 3%, respectively.

[0083] FIGS. 38A-B illustrate the ROC curve for a 48-marker assay, where the average individual marker sensitivity is 50%, as well as the calculated AUC, when the average number of molecules per marker in the blood ranges from 150 to 600 molecules. For FIGS. 38A and 38B, the calculations are based on an average individual marker false-positive rate of 4% and 5%, respectively.

[0084] FIGS. 39A-B provide a list of blood-based, colon cancer-specific microRNA markers derived through analysis of TCGA microRNA datasets, which may be present in exosomes or other protected state in the blood.

[0085] FIGS. 40A-X provide a list of blood-based, colon cancer-specific ncRNA and lncRNA markers, which may be present in exosomes or other protected state in the blood.

[0086] FIGS. 41A-C provide a list of candidate blood-based colon cancer-specific exon transcripts that may be enriched in in exosomes or other protected state in the blood.

[0087] FIGS. 42A-J provide a list of cancer proteins markers, identified through, mRNA sequences, protein expression levels, protein product concentrations, cytokines, or autoantibody to the protein product arising from Colorectal tumors, which may be identified in the blood, either within exosomes, other protected states, tumor-associated vesicles, or free within the plasma.

[0088] FIG. 43 provides a list of protein markers that can be secreted by Colorectal tumors into the blood.

[0089] FIGS. 44A-Y provide a list of primary CpG sites that are Colorectal Cancer and Colon-tissue specific markers, that may be used to identify the presence of colorectal cancer from cfDNA, or DNA within exosomes, or DNA in another protected state (such as within CTCs) within the blood.

[0090] FIGS. 45A-P provide a list of chromosomal regions or sub-regions within which are primary CpG sites that are Colorectal Cancer and Colon-tissue specific markers, that may be used to identify the presence of colorectal cancer from cfDNA, or DNA within exosomes, or DNA in other protected state (such as within CTCs) within the blood.

[0091] FIGS. 46A-B illustrate results for calculated overall Sensitivity and Specificity for a 24-marker assay, where the average individual marker sensitivity is 50%, and the average individual marker false-positive rate is from 2% to 5%; including one marker with a sensitivity at 90% (FIG. 46A) and a 10% (FIG. 46B) false-positive rate.

[0092] FIGS. 47A-B illustrate results for calculated overall Sensitivity and Specificity for a 24-marker assay, where the average individual marker sensitivity is 50%, and the average individual marker false-positive rate is from 2% to 5%; including two markers with a sensitivity at 90% (FIG. 47A) and a 10% (FIG. 47B) false-positive rate.

[0093] FIGS. 48A-B illustrate results for calculated overall Sensitivity and Specificity for a 48-marker assay, where the average individual marker sensitivity is 50%, and the average individual marker false-positive rate is from 2% to 5%; including one marker with a sensitivity at 90% (FIG. 48A) and a 10% (FIG. 48B) false-positive rate.

[0094] FIGS. 49A-B illustrate results for calculated overall Sensitivity and Specificity for a 48-marker assay, where the average individual marker sensitivity is 50%, and the average individual marker false-positive rate is from 2% to 5%; including two markers with a sensitivity at 90% (FIG. 49A) and a 10% (FIG. 49B) false-positive rate.

[0095] FIGS. 50A-B illustrate results for calculated overall Sensitivity and Specificity for a 24-marker assay, where the average individual marker sensitivity is 66% (FIG. 50A), and the average individual marker false-positive rate is from 2% to 5% (FIG. 50B).

[0096] FIGS. 51A-B illustrate results for calculated overall Sensitivity and Specificity for a 36-marker assay, where the average individual marker sensitivity is 66% (FIG. 51A), and the average individual marker false-positive rate is from 2% to 5% (FIG. 51B).

[0097] FIGS. 52A-B illustrate results for calculated overall Sensitivity and Specificity for a 48-marker assay, where the average individual marker sensitivity is 66% (FIG. 52A), and the average individual marker false-positive rate is from 2% to 5% (FIG. 52B).

[0098] FIG. 53 provides a list of blood-based, solid tumor-specific ncRNA and lncRNA markers, which may be present in exosomes or other protected state in the blood.

[0099] FIGS. 54A-F provide a list of candidate blood-based solid tumor-specific exon transcripts that may be enriched in in exosomes or other protected state in the blood.

[0100] FIGS. 55A-H provide a list of cancer proteins markers, identified through, mRNA sequences, protein expression levels, protein product concentrations, cytokines, or autoantibody to the protein product arising from solid tumors, which may be identified in the blood, either within exosomes, other protected states, tumor-associated vesicles, or free within the plasma.

[0101] FIGS. 56A-S provide a list of primary CpG sites that are solid-tumor and tissue-specific markers, that may be used to identify the presence of solid-tumor cancer from cfDNA, or DNA within exosomes, or DNA in another protected state (such as within CTCs) within the blood.

[0102] FIGS. 57A-J provide a list of chromosomal regions or sub-regions within which are primary CpG sites that are solid-tumor and tissue-specific markers, that may be used to identify the presence of solid-tumor cancer from cfDNA, or DNA within exosomes, or DNA in another protected state (such as within CTCs) within the blood.

[0103] FIG. 58 provide a list of cancer proteins markers, identified through, mRNA sequences, protein expression levels, protein product concentrations, cytokines, or autoantibody to the protein product arising from colon adenocarcinoma, rectal adenocarcinoma, stomach adenocarcinoma, or esophageal carcinoma, which may be identified in the blood, either within exosomes, other protected states, tumor-associated vesicles, or free within the plasma.

[0104] FIGS. 59A-S provide a list of primary CpG sites that are colon adenocarcinoma, rectal adenocarcinoma, stomach adenocarcinoma, or esophageal carcinoma and tissue-specific markers, that may be used to identify the presence of solid-tumor cancer from cfDNA, or DNA within exosomes, or DNA in another protected state (such as within CTCs) within the blood.

[0105] FIGS. 60A-J provide a list of chromosomal regions or sub-regions within which are primary CpG sites that are colon adenocarcinoma, rectal adenocarcinoma, stomach adenocarcinoma, or esophageal carcinoma and tissue-specific markers, that may be used to identify the presence of solid-tumor cancer from cfDNA, or DNA within exosomes, or DNA in another protected state (such as within CTCs) within the blood.

[0106] FIGS. 61A-C provide a list of primary CpG sites that are breast lobular and ductal carcinoma, uterine corpus endometrial carcinoma, ovarian serous cystadenocarcinoma, cervical squamous cell carcinoma and adenocarcinoma, or uterine carcinosarcoma and tissue-specific markers, that may be used to identify the presence of solid-tumor cancer from cfDNA, or DNA within exosomes, or DNA in another protected state (such as within CTCs) within the blood.

[0107] FIGS. 62A-B provide a list of chromosomal regions or sub-regions within which are primary CpG sites that are breast lobular and ductal carcinoma, uterine corpus endometrial carcinoma, ovarian serous cystadenocarcinoma, cervical squamous cell carcinoma and adenocarcinoma, or uterine carcinosarcoma and tissue-specific markers, that may be used to identify the presence of solid-tumor cancer from cfDNA, or DNA within exosomes, or DNA in another protected state (such as within CTCs) within the blood.

[0108] FIG. 63 provides a list of primary CpG sites that are lung adenocarcinoma, lung squamous cell carcinoma, or head & neck squamous cell carcinoma and tissue-specific markers, that may be used to identify the presence of solid-tumor cancer from cfDNA, or DNA within exosomes, or DNA in another protected state (such as within CTCs) within the blood.

[0109] FIG. 64 provides a list of chromosomal regions or sub-regions within which are primary CpG sites that are lung adenocarcinoma, lung squamous cell carcinoma, or head & neck squamous cell carcinoma and tissue-specific markers, that may be used to identify the presence of solid-tumor cancer from cfDNA, or DNA within exosomes, or DNA in another protected state (such as within CTCs) within the blood.

[0110] FIG. 65 provides a list of primary CpG sites that are prostate adenocarcinoma or invasive urothelial bladder cancer and tissue-specific markers, that may be used to identify the presence of solid-tumor cancer from cfDNA, or DNA within exosomes, or DNA in another protected state (such as within CTCs) within the blood.

[0111] FIG. 66 provides a list of chromosomal regions or sub-regions within which are primary CpG sites that are prostate adenocarcinoma or invasive urothelial bladder cancer and tissue-specific markers, that may be used to identify the presence of solid-tumor cancer from cfDNA, or DNA within exosomes, or DNA in another protected state (such as within CTCs) within the blood.

[0112] FIG. 67 provides a list of blood-based, liver hepatoceullular carcinoma, pancreatic ductal adenocarcinoma, or gallbladder adenocarcinoma-specific ncRNA and lncRNA markers, which may be present in exosomes or other protected state in the blood.

[0113] FIGS. 68A-E provide a list of candidate blood-based liver hepatoceullular carcinoma, pancreatic ductal adenocarcinoma, or gallbladder adenocarcinoma-specific exon transcripts that may be enriched in exosomes or other protected state in the blood.

[0114] FIGS. 69A-B provide a list of cancer proteins markers, identified through, mRNA sequences, protein expression levels, protein product concentrations, cytokines, or autoantibody to the protein product arising from liver hepatoceullular carcinoma, pancreatic ductal adenocarcinoma, or gallbladder adenocarcinoma, which may be identified in the blood, either within exosomes, other protected states, tumor-associated vesicles, or free within the plasma.

[0115] FIGS. 70A-E provide a list of primary CpG sites that are liver hepatoceullular carcinoma, pancreatic ductal adenocarcinoma, or gallbladder adenocarcinoma and tissue-specific markers, that may be used to identify the presence of solid-tumor cancer from cfDNA, or DNA within exosomes, or DNA in another protected state (such as within CTCs) within the blood.

[0116] FIGS. 71A-C provide a list of chromosomal regions or sub-regions within which are primary CpG sites that are liver hepatoceullular carcinoma, pancreatic ductal adenocarcinoma, or gallbladder adenocarcinoma and tissue-specific markers, that may be used to identify the presence of solid-tumor cancer from cfDNA, or DNA within exosomes, or DNA in another protected state (such as within CTCs) within the blood.

[0117] FIG. 72 illustrates the real-time PCR amplification plots obtained in the pixel Bisulfite-PCR-LDR-qPCR experiments to enumerate single molecules of methylated DNA in the presence of an excess of unmethylated DNA (Roche DNA).

[0118] FIG. 73 illustrates the real-time PCR amplification plots obtained in a multiplexed detection of 10 CRC methylation markers by Bisulfite-PCR-LDR-qPCR, using HT29 cell line DNA, with an average of 20 molecules each marker in 10,000 molecules of normal, e.g. unmethylated DNA (Roche DNA).

[0119] FIG. 74 illustrates the real-time PCR amplification plots obtained in a multiplexed detection of 7 CRC methylation markers by Bisulfite-exPCR-LDR-qPCR, using HT29 cell line DNA, with an average of 30 molecules each marker in 3,000 molecules of normal, e.g. unmethylated DNA (Roche DNA).

[0120] FIGS. 75A-B illustrate the real-time PCR amplification plots obtained in a multiplexed detection of 7 CRC methylation markers by Bisulfite-exPCR-LDR-qPCR, using cfDNA isolated from CRC (FIG. 75A) and Normal (FIG. 75B) plasma.

[0121] FIGS. 76A-B illustrate the real-time PCR amplification plots obtained in a multiplexed detection of 7 CRC methylation markers by Bisulfite-exPCR-LDR-qPCR, using cfDNA isolated from CRC (FIG. 76A) and Normal (FIG. 76B) plasma.

[0122] FIGS. 77A-B illustrate the real-time PCR amplification plots obtained in a multiplexed detection of 7 CRC methylation markers by Bisulfite-exPCR-LDR-qPCR, using cfDNA isolated from CRC (FIG. 77A) and Normal (FIG. 77B) plasma.

[0123] FIGS. 78A-B illustrate the real-time PCR amplification plots obtained in a multiplexed detection of 20 CRC methylation markers by Bisulfite-exPCR-LDR-qPCR, using HT29 cell line DNA, with 1,500 genome equivalents of HT29 cell line DNA in 7,500 genome equivalents of normal, e.g. unmethylated DNA (Roche DNA; FIG. 78A) compared with 7,500 genome equivalents of normal, e.g. unmethylated DNA (FIG. 78B).

[0124] FIGS. 79A-B illustrate the real-time PCR amplification plots obtained in a multiplexed detection of 20 CRC methylation markers by Bisulfite-exPCR-LDR-qPCR, using reverse primers with tails, using HT29 cell line DNA, with 200 genome equivalents of HT29 cell line DNA in 7,500 genome equivalents of normal, e.g. unmethylated DNA (Roche DNA; FIG. 79A) compared with 7,500 genome equivalents of normal, e.g. unmethylated DNA (FIG. 79B).

[0125] FIGS. 80A-B illustrate the real-time PCR amplification plots obtained in a multiplexed detection of 20 CRC methylation markers by Bisulfite-exPCR-LDR-qPCR, using reverse primers without tails, using HT29 cell line DNA, with 200 genome equivalents of HT29 cell line DNA in 7,500 genome equivalents of normal, e.g. unmethylated DNA (Roche DNA;

[0126] FIG. 80A) compared with 7,500 genome equivalents of normal, e.g. unmethylated DNA (FIG. 80B).

### DETAILED DESCRIPTION

[0127] A Universal Design for Early Detection of Cancer Using “Cancer Marker Load”

[0128] The most cost-effective early cancer detection test may combine an initial multiplexed coupled amplification and ligation assay to determine “cancer load”. For cancer detection, this would achieve >95% sensitivity for all cancers (pan-oncology), at >97% specificity.

[0129] Several flow charts for a cancer tumor load assay is illustrated in FIG. 1. In its simplest form, the assay would be a one-step assay to identify individuals with early colorectal cancer (CRC). A blood sample is fractionated into plasma and other components as needed, a set of 24 markers with average sensitivity of 50% are assayed, and the results are recorded (FIG. 1A). For example, an initial multiplexed PCR/LDR screening assay scoring for mutation, methylation, miRNA, mRNA, alternative splicing, and/or translocations identifies those samples with positive results. The physician is not concerned with which specific markers are positive but gives a simple directive. Those patients with 0-2 markers positive are told not to worry, go home, you are cancer-free. Those patients with 5 of 24 markers positive are directed to get a colonoscopy. Those patients with an intermediate number of positive markers (3-4) are instructed to come back in 3-6 months for retesting. Thus, the test is based on the overall cancer marker load and not dependent on the specific markers that teat positive.

[0130] In an advanced version of the test, a two-step assay would be performed to identify if the patient has colorectal cancer. The rationale for a two-step test is to initially cast a wide net to maximize sensitivity in identifying the most individuals with potential cancer, followed by a second step only on the positive samples (which contain both true and false-positives) to maximize specificity, eliminate virtually all the false-positives, and hone in on those individuals most likely to have cancer. In the first step, a blood sample is fractionated into plasma and other components as needed, followed by an assay to interrogate an initial set of 24 markers with an average sensitivity of 50% (FIG. 1B). The first step assay can employ multiplexed PCR/LDR, or digital PCR screening to score for mutation, methylation, miRNA, mRNA, alternative splicing, and/or translocations events. As in the one-step assay, patients with 0-2 markers positive are presumed to be cancer-free. On the other hand, patients with 3 markers positive will undergo a second step, wherein 48 (new) markers are assayed and scored as follows: 0-3 positive markers are considered cancer-free; 4-5 positive markers are advised to come back in 3-6 months for retesting; 6 positive markers are directed to go get a colonoscopy.

[0131] In a pan-oncology version of the test, in the first step the assay would screen 96 markers, wherein on average 36 such markers would exhibit an average sensitivity of 50% for most major cancers (see FIG. 1C). These cancers would cluster to certain groups, which include: Group 1 (Colorectal, Stomach, Esophagus); Group 2 (Breast, Endometrial, Ovarian, Cervical, Uterine); Group 3 (Lung, Head & Neck); Group 4 (Prostate, Bladder), and Group 5 (Liver, Pancreatic, Gall Bladder). Patients with 0-4 markers positive are presumed to be cancer-free, while patients with 5 markers positive will undergo a second step. Presumptive positive samples are then assayed in the second step, testing 1 or 2 groups, using 64 markers per group, wherein on average 36 such markers would exhibit an average sensitivity of 50% for each specific type of cancer within that group, including using tissue-specific markers to validate the initial result and to identify tissue of origin. Results are scored as follows: 0-3 positive markers are considered cancer-free; 4 positive markers are advised to come back in 3-6 months for retesting; 5 positive markers are directed to go to imaging that matches the type(s) of cancer most likely to be the tissue of origin. For higher sensitivities, both the initial 96 markers in the first step, and the group-specific markers in the second step would have average sensitivity of 66% (FIG. 1D). The physician may then order targeted sequencing to further guide treatment decisions for the patient.

[0132] The present application is directed to a universal diagnostic approach that seeks to combine the best features of digital polymerase chain reaction (PCR), or quantitative polymerase chain reaction (qPCR), with bisulfite conversion, ligation detection reaction (LDR), and quantitative detection of multiple disease markers, e.g., cancer markers.

### Multiplexing, Avoiding False-Positives, and Carryover Protection

[0133] There is a technical challenge of distinguishing true signal generated from the desired disease-specific nucleic acid differences vs. false signal generated from normal nucleic acids present in the sample vs. false signal generated in the absence of the disease-specific nucleic acid differences (i.e. somatic mutations).

[0134] A number of solutions to these challenges are presented below, but they share some common themes.

[0135] The first theme is multiplexing. PCR works best when primer concentration is relatively high, from 50 nM to 500 nM, limiting multiplexing. Further, the more PCR primer pairs added, the chances of amplifying incorrect products or creating primer-dimers increase exponentially. In contrast, for LDR probes, low concentrations on the order of 4 nM to 20 nM are used, and probe-dimers are limited by the requirement for adjacent hybridization on the target to allow for a ligation event. Use of low concentrations of gene-specific PCR primers or LDR probes containing universal primer sequence “tails” allows for subsequent addition of higher concentrations of universal primers to achieve proportional amplification of the initial PCR or LDR products. Another way to avoid or minimize false PCR amplicons or primer dimers is to use PCR primers containing a few extra bases and a blocking group, which is liberated to form a free 3′OH by cleavage with a nuclease only when hybridized to the target, e.g., a ribonucleotide base as the blocking group and RNase H2 as the cleaving nuclease.

[0136] The second theme is fluctuations in signal due to low input target nucleic acids. Often, the target nucleic acid originated from a few cells, either captured as CTCs, or from tumor cells that underwent apoptosis and released their DNA as small fragments (140-160 bp) in the serum. Under such conditions, it is preferable to perform some level of proportional amplification to avoid missing the signal altogether or reporting inaccurate copy number due to fluctuations when distributing small numbers of starting molecules into individual wells (for real-time, or droplet PCR quantification). As long as these initial amplifications are kept at a reasonable level (approximately 12 to 20 cycles), the risk of carryover contamination during opening of the tube and distributing amplicons for subsequent detection/quantification (using real-time, or droplet PCR) is minimized. Other schemes use even lower amounts of limited amplifications, (approximately 8 to 12 cycles).

[0137] The third theme is target-independent signal, also known as “No Template Control” (NTC). This arises from either polymerase or ligase reactions that occur in the absence of the correct target. Some of this signal may be minimized by judicious primer design. For ligation reactions, the 5′→3′ nuclease activity of polymerase may be used to liberate the 5′ phosphate of the downstream ligation primer (only when hybridized to the target), so it is suitable for ligation. Further specificity for distinguishing presence of a low-level mutation using LDR may be achieved by: (i) using upstream mutation-specific LDR probes containing a mismatch in the 2^{nd} or 3^{rd} position from the 3′OH base, (ii) using LNA or PNA probes to wild-type sequence that would reduce hybridization of mutation-specific LDR probes to wild-type sequences, (iii) using LDR probes to wild-type sequence that (optionally) ligate but do not undergo additional amplification, and (iv) using upstream LDR probes containing a few extra bases and a blocking group, which is liberated to form a free 3′OH by cleavage with a nuclease only when hybridized to the complementary target (e.g., RNase H2 and a ribonucleotide base). Similar approaches for improving the specificity for distinguishing presence of a low-level mutation using PCR may be achieved by: (i) using mutation-specific PCR Primers containing a mismatch in the 2^{nd} or 3^{rd} position from the 3′OH base, (ii) using LNA or PNA probes to wild-type sequence that would reduce hybridization of mutation-specific PCR primers to wild-type sequences, (iii) using PCR primers to wild-type sequence that are blocked and do not undergo additional amplification, and (iv) using upstream PCR primers containing a few extra bases and a blocking group, which is liberated to form a free 3′OH by cleavage with a nuclease only when hybridized to the complementary target (e.g., RNase H2 and a ribonucleotide base).

[0138] The fourth theme is either suppressed (reduced) amplification or incorrect (false) amplification due to unused primers in the reaction. One approach to eliminate such unused primers is to capture genomic or target or amplified target DNA on a solid support, allow ligation probes to hybridize and ligate, and then remove probes or products that are not hybridized. Alternative solutions include pre-amplification, followed by subsequent nested LDR and/or PCR steps, such that there is a second level of selection in the process.

[0139] The fifth theme is carryover prevention. Carryover signal may be eliminated by standard uracil incorporation during the universal PCR amplification step, and by using UDG (and optionally AP endonuclease) in the pre-amplification workup procedure. Incorporation of carryover prevention is central to the methods of the present application as described in more detail below. The initial PCR amplification is performed using incorporation of uracil. The LDR reaction is performed with LDR probes lacking uracil. Thus, when the LDR products are subjected to real-time PCR quantification, addition of UDG destroys the initial PCR products, but not the LDR products. Further, since LDR is a linear process and the tag primers use sequences absent from the human genome, accidental carryover of LDR products back to the original PCR will not cause template-independent amplification. Additional schemes to provide carryover prevention with methylated targets include use of restriction endonucleases to destroy unmethylated DNA prior to PCTR amplification, or capturing and enriching methylated DNA using methyl-specific DNA binding proteins or antibodies.

[0140] The sixth theme is achieving even amplification of many mutation-specific or methylation-specific targets in the multiplexed reaction. One approach, as already described above, is to perform limited initial PCR amplifications (8 to 12, or 12 to 20 cycles). However, sometimes different products amplify at different rates, especially when using mutation- or methylation-specific primers, or when using blocking LNA or PNA probes or other means to suppress amplification of wild-type DNA. This is because a regular PCR reaction has both forward and reverse primers working simultaneously. Although there may be preferential amplification using as an example a forward methylation-specific primer (i.e. after bisulfite treatment), the reverse primer will amplify both methylated and un-methylated DNA (again, after bisulfite treatment), and thus will magnify differences in initial rates of forward primer amplification. Further, and this also holds when using mutation-specific forward primers, the use of non-selecting reverse primers means that initial amplification products still contain substantial amounts of wild-type DNA sequence, which may lead to undesired false-positives in subsequent amplification steps. One approach is to perform an initial single-sided linear amplification, using primers that amplify only one strand of target DNA. This is particularly useful when amplifying bisulfite-treated DNA, where the two resultant strands are no longer complementary to each other. An important variation of this theme destroys the initial target DNA after the linear amplification step. This may be achieved by incorporating one or more modified nucleotides, such as α-thio-dNTPs, that protect the initial extension products (but not the original cfDNA or genomic DNA) from exonuclease I digestion. When using bisulfite converted DNA, after performing the initial single-sided linear amplification (i.e., the polymerase extension reaction) with regular dNTP's (i.e. NO dUTP), the original bisulfite-converted DNA may be destroyed using UDG.

### Methods of Identifying Cancer Markers

[0141] A first aspect of the present application is directed to a method for identifying, in a sample, one or more parent nucleic acid molecules containing a target nucleotide sequence differing from nucleotide sequences of other parent nucleic acid molecules in the sample by one or more nucleotides, one or more copy numbers, one or more transcript sequences, and/or one or more methylated residues. The method involves providing a sample containing one or more parent nucleic acid molecules potentially containing the target nucleotide sequence differing from the nucleotide sequences of other parent nucleic acid molecules by one or more nucleotides, one or more copy numbers, one or more transcript sequences, and/or one or more methylated residues. One or more enzymes capable of digesting deoxyuracil (dU)-containing nucleic acid molecules are then provided. One or more primary oligonucleotide primer sets are also provided. Each primary oligonucleotide primer set comprises (a) a first primary oligonucleotide primer that comprises a nucleotide sequence that is complementary to a sequence in the parent nucleic acid molecule adjacent to the target nucleotide sequence and (b) a second primary oligonucleotide primer that comprises a nucleotide sequence that is complementary to a portion of an extension product formed from the first primary oligonucleotide primer. The sample, the one or more first primary oligonucleotide primers of the primary oligonucleotide primer sets, the one or more enzymes capable of digesting deoxyuracil (dU)-containing nucleic acid molecules, a deoxynucleotide mix, and a DNA polymerase are blended to form one or more polymerase extension reaction mixtures, and the one or more polymerase extension reaction mixtures are subjected to conditions suitable for digesting deoxyuracil (dU)-containing nucleic acid molecules present in the polymerase extension reaction mixtures and for carrying out one or more polymerase extension reaction cycles comprising a denaturation treatment, a hybridization treatment, and an extension treatment, thereby forming primary extension products comprising nucleotide sequences complementary to the target nucleotide sequence. The one or more polymerase extension reaction mixtures comprising the primary extension products, the one or more second primary oligonucleotide primers of the primary oligonucleotide primer sets, the one or more enzymes capable of digesting deoxyuracil (dU)-containing nucleic acid molecules in the reaction mixtures, a deoxynucleotide mix including dUTP, and a DNA polymerase are blended to form one or more first polymerase chain reaction mixtures. The method further comprises subjecting the one or more first polymerase chain reaction mixtures to conditions suitable for digesting deoxyuracil (dU)-containing nucleic acid molecules present in the polymerase chain reaction mixtures and for carrying out one or more polymerase chain reaction cycles comprising a denaturation treatment, a hybridization treatment, and an extension treatment, thereby forming one or more first polymerase chain reaction products comprising the target nucleotide sequence or a complement thereof. One or more oligonucleotide probe sets are then provided. Each probe set comprises (a) a first oligonucleotide probe having a 5′ primer-specific portion and a 3′ target sequence-specific portion, and (b) a second oligonucleotide probe having a 5′ target sequence-specific portion and a 3′ primer-specific portion, wherein the first and second oligonucleotide probes of a probe set are configured to hybridize, in a base specific manner, on a complementary target nucleotide sequence of a secondary extension product. The one or more first polymerase chain reaction products are blended with a ligase, and the one or more oligonucleotide probe sets to form one or more ligation reaction mixtures. The one or more ligation reaction mixtures are subjected to one or more ligation reaction cycles whereby the first and second oligonucleotide probes of the one or more oligonucleotide probe sets are ligated together, when hybridized to complementary sequences, to form ligated product sequences in the ligation reaction mixtures wherein each ligated product sequence comprises the 5′ primer-specific portion, the target-specific portions, and the 3′ primer-specific portion. The method further includes providing one or more secondary oligonucleotide primer sets. Each secondary oligonucleotide primer set comprises (a) a first secondary oligonucleotide primer comprising the same nucleotide sequence as the 5′ primer-specific portion of the ligated product sequence and (b) a second secondary oligonucleotide primer comprising a nucleotide sequence that is complementary to the 3′ primer-specific portion of the ligated product sequence. The ligated product sequences, the one or more secondary oligonucleotide primer sets, the one or more enzymes capable of digesting deoxyuracil (dU)-containing nucleic acid molecules, a deoxynucleotide mix including dUTP, and a DNA polymerase are blended to form one or more second polymerase chain reaction mixtures. The one or more second polymerase chain reaction mixtures are subjected to conditions suitable for digesting deoxyuracil (dU)-containing nucleic acid molecules present in the second polymerase chain reaction mixtures and for carrying out one or more polymerase chain reaction cycles comprising a denaturation treatment, a hybridization treatment, and an extension treatment thereby forming one or more second polymerase chain reaction products. The method further comprises detecting and distinguishing the one or more second polymerase chain reaction products in the one or more second polymerase chain reaction mixtures to identify the presence of one or more parent nucleic acid molecules containing target nucleotide sequences differing from nucleotide sequences in other parent nucleic acid molecules in the sample by one or more nucleotides, one or more copy numbers, one or more transcript sequences, and/or one or more methylated residues.

[0142] FIGS. 2 and 3 illustrate various embodiments of this aspect of the present application, abbreviated as exPCR-LDR-qPCR carryover prevention reaction to detect low-level mutations (exPCR is an abbreviation for one-sided extension using primers to one strand of a locus, followed by PCR—using either the same primers in the initial extension, or additional primers for the PCR step). Genomic or cfDNA is isolated (FIG. 2, step A), and the isolated DNA sample is treated with UDG to digest dU containing nucleic acid molecules that may be present in the sample (FIG. 2, step B). Suitable enzymes include, without limitation, E. coli uracil DNA glycosylase (UDG), Antarctic Thermolabile UDG, or Human single-strand-selective monofunctional uracil-DNA Glycosylase (hSMUG1). The regions of interest are selectively extended using locus-specific upstream primers, a blocking LNA or PNA probe comprising wild-type sequence, and a deoxynucleotide mix that includes dUTP. In this embodiment, another layer of selectivity can be incorporated into the method by including a 3′ cleavable blocking group (Blk 3′, e.g. C3 spacer), and an RNA base (r), in the upstream primer. Upon target-specific hybridization, RNase H (star symbol) removes the RNA base to liberate a 3′OH group which is a few bases upstream of the mutation, and suitable for polymerase extension (FIG. 2 or 3, step B; see e.g., Dobosy et. al. “RNase H-Dependent PCR (rhPCR): Improved Specificity and Single Nucleotide Polymorphism Detection Using Blocked Cleavable Primers,” BMC Biotechnology 11(80):1011 (2011), which is hereby incorporated by reference in its entirety). A blocking LNA or PNA probe comprising wild-type sequence that partially overlaps with the upstream PCR primer will preferentially compete in binding to wild-type sequence over the upstream primer, but not as much to mutant DNA, and thus suppresses extension of wild-type DNA during each round of primer extension. Sample is optionally aliquoted into 12, 24, 36, 48, or 96 wells prior to the initial extension step. Subsequently, the locus-specific downstream primers are added, followed by limited (8 to 20 cycles) or full (20-40 cycles) PCR. Optionally, the downstream primers contain identical 8-11 base tails to prevent primer dimers. Further, such tails provide the option for asymmetric PCR at the end of the PCR cycles, by raising the hybridization temperature above that for the forward primers, but at or below that for the reverse primers—which at 8-11 bases longer will have higher Tm values. This generates more bottom strand products, which are suitable substrates for the subsequent LDR step. In an alternative embodiment, the initial extension products incorporate one or more modified nucleotides, such as α-thio-dNTPs, that protect the initial extension products (but not the original cfDNA or genomic DNA) from exonuclease I digestion. After exonuclease I digestion, the down-stream locus-specific primers (optionally containing identical 8-11 base tails) are added, again followed by limited (8 to 20 cycles) or full (20-40 cycles) PCR. The amplified products contain dU as shown in FIG. 2 or 3, step D, which allows for subsequent treatment with UDG or a similar enzyme for carryover prevention.

[0143] As shown in FIG. 2 step E, target-specific oligonucleotide probes are hybridized to the amplified products and ligase (filled circle) covalently seals the two oligonucleotides together when hybridized to their complementary sequence. In this embodiment, the upstream oligonucleotide probe having a sequence specific for detecting the mutation of interest further contains a 5′ primer-specific portion (Ai) to facilitate subsequent detection of the ligation product. Once again, the presence of blocking LNA or PNA probe comprising wild-type sequence suppresses ligation to wild-type target sequence if present after the enrichment of mutant sequence during the PCR amplification step. The downstream oligonucleotide probe, having a sequence common to both mutant and wild-type sequences contains a 3′ primer-specific portion (Ci′) that, together with the 5′ primer specific portion (Ai) of the upstream probe having a sequence specific for detecting the mutation, permit subsequent amplification and detection of only mutant ligation products. As illustrated in step E of FIG. 2, another layer of specificity can be incorporated into the method by including a 3′ cleavable blocking group (Blk 3′, e.g. C3 spacer), and an RNA base (r), in the upstream ligation probe. Upon target-specific hybridization, RNase H (star symbol) removes the RNA base to generate a ligation competent 3′OH group (FIG. 2, step D).

[0144] As shown in FIG. 2, step F, target-specific oligonucleotide probes are hybridized to the amplified products and ligase (filled circle) covalently seals the two oligonucleotides together when hybridized to their complementary sequence. The upstream oligonucleotide probe contains a 5′ primer-specific portion (Ai) and the downstream oligonucleotide probe contains a 3′ primer-specific portion (Ci′) that permits subsequent amplification of the ligation product. Following ligation, the ligation products are aliquoted into separate wells, micro-pores or droplets containing one or more tag-specific primer pairs, each pair comprising matched primers Ai and Ci, treated with UDG or similar enzyme to remove dU containing amplification products or contaminants, PCR amplified, and detected. As shown in FIG. 2, steps G & H, detection of the ligation product can be carried out using traditional TaqMan™ detection assay (see U.S. Pat. No. 6,270,967 to Whitcombe et al., and U.S. Pat. No. 7,601,821 to Anderson et al., which are hereby incorporated by reference in their entirety). For detection using TaqMan™ an oligonucleotide probe spanning the ligation junction is used in conjunction with primers suitable for hybridization on the primer-specific portions of the ligation products for amplification and detection. The TaqMan™ probe contains a fluorescent reporter group on one end (F1) and a quencher molecule (Q) on the other end that are in close enough proximity to each other in the intact probe that the quencher molecule quenches fluorescence of the reporter group. During amplification, the TaqMan™ probe and upstream primer hybridize to their complementary regions of the ligation product. The 5′→3′ nuclease activity of the polymerase extends the hybridized primer and liberates the fluorescent group of the TaqMan™ probe to generate a detectable signal (FIG. 2, step H). In a preferred embodiment, the Taqman probe contains a second quencher group (ZEN) about 9 bases in from the fluorescent reporter group, and the probe is designed such that the ZEN group is at or adjacent to the mutant base. Use of dUTP during the amplification reaction generates products containing dU, which can subsequently be destroyed using UDG for carryover prevention.

[0145] As shown in FIG. 3 step D, target-specific oligonucleotide probes are hybridized to the amplified products and ligase (filled circle) covalently seals the two oligonucleotides together when hybridized to their complementary sequence. In this embodiment, the upstream oligonucleotide probe having a sequence specific for detecting the mutation of interest further contains a 5′ primer-specific portion (Ai) to facilitate subsequent detection of the ligation product. Once again, the presence of blocking LNA or PNA probe comprising wild-type sequence suppresses ligation to wild-type target sequence if present after the enrichment of mutant sequence during the PCR amplification step. The downstream oligonucleotide probe, having a sequence common to both mutant and wild-type sequences contains a 3′ primer-specific portion (Bi-Ci′) that, together with the 5′ primer specific portion (Ai) of the upstream probe having a sequence specific for detecting the mutation, permit subsequent amplification and detection of only mutant ligation products. As illustrated in step D of FIG. 3, another layer of specificity can be incorporated into the method by including a 3′ cleavable blocking group (Blk 3′, e.g. C3 spacer), and an RNA base (r), in the upstream ligation probe. Upon target-specific hybridization, RNase H (star symbol) removes the RNA base to generate a ligation competent 3′OH group (FIG. 3, step D).

[0146] In this embodiment, the ligation probes are designed to contain UniTaq primer and tag sequences to facilitate detections. The UniTaq system is fully described in U.S. Patent Application Publication No. 2011/0212846 to Spier, which is hereby incorporated by reference in its entirety. The UniTaq system involves the use of three unique “tag” sequences, where at least one of the unique tag sequences (Ai) is present in the first oligonucleotide probe, and the second and third unique tag portions (Bi′ and Ci′) are in the second oligonucleotide probe sequence as shown in FIG. 3, step D & E. Upon ligation of oligonucleotide probes in a probe set, the resulting ligation product will contain the Ai sequence—target specific sequences—Bi′ sequence—Ci′ sequence. The essence of the UniTaq approach is that both oligonucleotide probes of a ligation probe set need to be correct in order to get a positive signal, which allows for highly multiplexed nucleic acid detection. For example, and as described herein, this is achieved by requiring hybridization of two parts, i.e., two of the tags, to each other.

[0147] Prior to detecting the ligation product, the sample is treated with UDG to destroy original target amplicons allowing only authentic ligation products to be detected. Following ligation, the ligation products are aliquoted into separate wells, micro-pores or droplets containing one or more tag-specific primer pairs. For the detection step, the ligation product containing Ai (a first primer-specific portion), Bi′ (a UniTaq detection portion), and Ci′ (a second primer-specific portion) is primed on both strands using a first oligonucleotide primer having the same nucleotide sequence as Ai, and a second oligonucleotide primer that is complementary to Ci′ (i.e., Ci). The first oligonucleotide primer also includes a UniTaq detection probe (Bi) that has a detectable label F1 on one end and a quencher molecule (Q) on the other end (F1-Bi-Q-Ai). Optionally positioned proximal to the quencher is a polymerase-blocking unit, e.g., HEG, THF, Sp-18, ZEN, or any other blocker known in the art that is sufficient to stop polymerase extension. In another embodiment, a ZEN quencher group is also positioned about 9 bases from the fluorescent reporter group to assure more complete quenching. PCR amplification results in the formation of double stranded products as shown in FIG. 3, step G). In this example, a polymerase-blocking unit prevents a polymerase from copying the 5′ portion (Bi) of the first universal primer, such that the bottom strand of product cannot form a hairpin when it becomes single-stranded. Formation of such a hairpin would result in the 3′ end of the stem annealing to the amplicon such that polymerase extension of this 3′ end would terminate the PCR reaction.

[0148] The double stranded PCR products are denatured, and when the temperature is subsequently decreased, the upper strand of product forms a hairpin having a stem between the 5′ portion (Bi) of the first oligonucleotide primer and portion Bi′ at the opposite end of the strand (FIG. 3, step H). Also, during this step, the second oligonucleotide primer anneals to the 5′-primer specific portion (Ci′) of the hairpinned product. Upon extension of the second universal primer in step H, 5′ nuclease activity of the polymerase cleaves the detectable label D1 or the quencher molecule from the 5′ end of the amplicon, thereby increasing the distance between the label and the quencher and permitting detection of the label.

[0149] The ligation reaction used in the methods of the present application is well known in the art. Ligases suitable for ligating oligonucleotide probes of a probe set together (optionally following cleavage of a 3′ ribose and blocking group on the first oligonucleotide probe, or the 5′ flap on the second oligonucleotide probe) include, without limitation Thermus aquaticus ligase, E. coli ligase, T4 DNA ligase, T4 RNA ligase, Tag ligase, 9 N ligase, and Pyrococcus ligase, or any other thermostable ligase known in the art. In accordance with the present application, the nuclease-ligation process of the present application can be carried out by employing an oligonucleotide ligation assay (OLA) reaction (see Landegren, et al., “A Ligase-Mediated Gene Detection Technique,” Science 241:1077-80 (1988); Landegren, et al., “DNA Diagnostics—Molecular Techniques and Automation,” Science 242:229-37 (1988); and U.S. Pat. No. 4,988,617 to Landegren, et al., which are hereby incorporated by reference in their entirety), a ligation detection reaction (LDR) that utilizes one set of complementary oligonucleotide probes (see e.g., WO 90/17239 to Barany et al, which is hereby incorporated by reference in its entirety), or a ligation chain reaction (LCR) that utilizes two sets of complementary oligonucleotide probes see e.g., WO 90/17239 to Barany et al, which is hereby incorporated by reference in its entirety).

[0150] The oligonucleotide probes of a probe sets can be in the form of ribonucleotides, deoxynucleotides, modified ribonucleotides, modified deoxyribonucleotides, peptide nucleotide analogues, modified peptide nucleotide analogues, modified phosphate-sugar-backbone oligonucleotides, nucleotide analogs, and mixtures thereof.

[0151] The hybridization step in the ligase detection reaction, which is preferably a thermal hybridization treatment, discriminates between nucleotide sequences based on a distinguishing nucleotide at the ligation junctions. The difference between the target nucleotide sequences can be, for example, a single nucleic acid base difference, a nucleic acid deletion, a nucleic acid insertion, or rearrangement. Such sequence differences involving more than one base can also be detected. Preferably, the oligonucleotide probe sets have substantially the same length so that they hybridize to target nucleotide sequences at substantially similar hybridization conditions.

[0152] Ligase discrimination can be further enhanced by employing various probe design features. For example, an intentional mismatch or nucleotide analogue (e.g., Inosine, Nitroindole, or Nitropyrrole) can be incorporated into the first oligonucleotide probe at the 2^{nd} or 3^{rd} base from the 3′ junction end to slightly destabilize hybridization of the 3′ end if it is perfectly matched at the 3′ end, but significantly destabilize hybridization of the 3′ end if it is mis-matched at the 3′ end. This design reduces inappropriate misligations when mutant probes hybridize to wild-type target. Alternatively, RNA bases that are cleaved by RNases can be incorporated into the oligonucleotide probes to ensure template-dependent product formation. For example, Dobosy et. al. “RNase H-Dependent PCR (rhPCR): Improved Specificity and Single Nucleotide Polymorphism Detection Using Blocked Cleavable Primers,” BMC Biotechnology 11(80): 1011 (2011), which is hereby incorporated by reference in its entirety, describes using an RNA-base close to the 3′ end of an oligonucleotide probe with 3′-blocked end, and cutting it with RNase H2 generating a PCR-extendable and ligatable 3′-OH. This approach can be used to generate either ligation-competent 3′OH (for standard DNA ligases) or 5′-P, or both, in the latter case, provided a ligase that can ligate 5′-RNA base is utilized.

[0153] Other possible modifications included abasic sites, e.g., internal abasic furan or oxo-G. These abnormal “bases” are removed by specific enzymes to generate ligation-competent 3′-OH or 5′P sites. Endonuclease IV, Tth EndoIV (NEB) will remove abasic residues after the ligation oligonucleotides anneal to the target nucleic acid, but not from a single-stranded DNA. Similarly, one can use oxo-G with Fpg or inosine/uracil with EndoV or Thymine glycol with EndoVIII.

[0154] Ligation discrimination can also be enhanced by using the coupled nuclease-ligase reaction described in WO2013/123220 to Barany et al. or U.S. Patent Application Publication No. 2006/0234252 to Anderson et al., which are hereby incorporated by reference in their entirety. In this embodiment, the first oligonucleotide probe bears a ligation competent 3′ OH group while the second oligonucleotide probe bears a ligation incompetent 5′ end (i.e., an oligonucleotide probe without a 5′ phosphate). The oligonucleotide probes of a probe set are designed such that the 3′-most base of the first oligonucleotide probe is overlapped by the immediately flanking 5′-most base of the second oligonucleotide probe that is complementary to the target nucleic acid molecule. The overlapping nucleotide is referred to as a “flap”. When the overlapping flap nucleotide of the second oligonucleotide probe is complementary to the target nucleic acid molecule sequence and the same sequence as the terminating 3′ nucleotide of the first oligonucleotide probe, the phosphodiester bond immediately upstream of the flap nucleotide of the second oligonucleotide probe is discriminatingly cleaved by an enzyme having flap endonuclease (FEN) or 5′ nuclease activity. That specific FEN activity produces a novel ligation competent 5′ phosphate end on the second oligonucleotide probe that is precisely positioned alongside the adjacent 3′ OH of the first oligonucleotide probe to allow ligation of the two probes to occur. In accordance with this embodiment, flap endonucleases or 5′ nucleases that are suitable for cleaving the 5′ flap of the second oligonucleotide probe prior to ligation include, without limitation, polymerases with 5′ nuclease activity such as E. coli DNA polymerase and polymerases from Taq and T. thermophilus, as well as T4 RNase H and TaqExo. In another embodiment, the second probe of the probe set has a 3′ primer-specific portion, a target specific portion, and a 5′ nucleotide sequence, where the 5′ nucleotide sequence is complementary to at least a portion of the 3′ primer-specific portion, and where the 5′ nucleotide sequence hybridizes to its complementary portion of the 3′ primer-specific portion to form a hair-pinned second oligonucleotide probe when the second probe is not hybridized to a target nucleotide sequence.

[0155] For insertions or deletions, incorporation of a matched base or nucleotide analogues (e.g., -amino-dA or 5-propynyl-dC) in the first oligonucleotide probe at the 2^{nd} or 3^{rd} position from the junction improves stability and may improve discrimination of such frameshift mutations from wild-type sequences. For insertions, use of one or more thiophosphate-modified nucleotides downstream from the desired scissile phosphate bond of the second oligonucleotide probe will prevent inappropriate cleavage by the 5′ nuclease enzyme when the probes are hybridized to wild-type DNA, and thus reduce false-positive ligation on wild-type target. Likewise, for deletions, use of one or more thiophosphate-modified nucleotides upstream from the desired scissile phosphate bond of the second oligonucleotide probe will prevent inappropriate cleavage by the 5′ nuclease enzyme when the probes are hybridized to wild-type DNA, and thus reduce false-positive ligation on wild-type target.

[0156] Another aspect of the present application is directed to a method for identifying, in a sample, one or more parent nucleic acid molecules containing a target nucleotide sequence differing from nucleotide sequences in other parent nucleic acid molecules in the sample by one or more nucleotides, one or more copy numbers, one or more transcript sequences, and/or one or more methylated residues. The method involves providing a sample containing one or more parent nucleic acid molecules potentially containing the target nucleotide sequence differing from the nucleotide sequences of other parent nucleic acid molecules by one or more nucleotides, one or more copy numbers, one or more transcript sequences, and/or one or more methylated residues. One or more enzymes capable of digesting deoxyuracil (dU) containing nucleic acid molecules, one or more nucleases capable of digesting nucleic acid molecules not comprising modified nucleotides, and one or more first primary oligonucleotide primer(s) are provided. The one or more first primary oligonucleotide primer(s) comprise a nucleotide sequence that is complementary to a sequence in the parent nucleic acid molecule adjacent to the target nucleotide sequence. The sample, the one or more first primary oligonucleotide primers, the one or more enzymes capable of digesting deoxyuracil (dU)-containing nucleic acid molecules, a deoxynucleotide mix that comprises one or more modified nucleotides that protect extension products but not target DNA from nuclease digestion, and a DNA polymerase are blended to form one or more polymerase extension reaction mixtures, and the one or more polymerase extension reaction mixtures are subjected to conditions suitable for digesting deoxyuracil (dU)-containing nucleic acid molecules present in the polymerase extension reaction mixture and for carrying out one or more polymerase extension reaction cycles comprising a denaturation treatment, a hybridization treatment, and an extension treatment, thereby forming primary extension products comprising the complement of the target nucleotide sequence. The method further comprises providing one or more secondary oligonucleotide primer sets. Each secondary oligonucleotide primer set comprises (a) a first secondary oligonucleotide primer having a first 5′ primer-specific portion and a 3′ portion that is complementary to a portion of a primary extension product formed from the first primary oligonucleotide primer and (b) a second secondary oligonucleotide primer having a second 5′ primer-specific portion and a 3′ portion that comprises a nucleotide sequence that is complementary to a portion of an extension product formed from the first secondary oligonucleotide primer. The one or more polymerase extension reaction mixtures comprising the primary extension products, the one or more secondary oligonucleotide primer sets, the one or more nucleases, a deoxynucleotide mix, and a DNA polymerase are blended to form one or more first polymerase chain reaction mixtures, and the one or more first polymerase chain reaction mixtures are subjected to conditions suitable for digesting nucleic acid molecules present in the first polymerase chain reaction mixtures, but not primary extension products comprising modified nucleotides and for carrying out two or more polymerase chain reaction cycles comprising a denaturation treatment, a hybridization treatment, and an extension treatment, thereby forming one or more first polymerase chain reaction products comprising the first 5′ primer-specific portion, a target-specific nucleotide sequence or a complement thereof, and a complement of the second 5′ primer-specific portion. One or more tertiary oligonucleotide primer sets are provided. Each tertiary oligonucleotide primer set comprises (a) a first tertiary oligonucleotide primer comprising the same nucleotide sequence as the first 5′ primer-specific portion of the one or more first polymerase chain reaction products and (b) a second tertiary oligonucleotide primer comprising a nucleotide sequence that is complementary to the 3′ primer-specific portion of the one or more first polymerase chain reaction products. The one or more first polymerase chain reaction products, the one or more tertiary oligonucleotide primer sets, the one or more enzymes capable of digesting deoxyuracil (dU) containing nucleic acid molecules, a deoxynucleotide mix including dUTP, and a DNA polymerase are blended to form one or more second polymerase chain reaction mixtures, and the one or more second polymerase chain reaction mixtures are subjected to conditions suitable for digesting deoxyuracil (dU) containing nucleic acid molecules present in the second polymerase chain reaction mixtures and for carrying out one or more polymerase chain reaction cycles comprising a denaturation treatment, a hybridization treatment, and an extension treatment, thereby forming one or more second polymerase chain reaction products. The method further involves detecting and distinguishing the one or more second polymerase chain reaction products in the one or more second polymerase chain reaction mixtures to identify the presence of one or more parent nucleic acid molecules containing target nucleotide sequences differing from nucleotide sequences in other parent nucleic acid molecules in the sample by one or more nucleotides, one or more copy numbers, one or more transcript sequences, and/or one or more methylated residues.

[0157] FIGS. 4-8 illustrate various embodiments of this aspect of the present application.

[0158] FIG. 4 illustrates an exemplary exPCR-qPCR carryover prevention reaction to detect low-level mutations. Genomic or cfDNA is isolated (FIG. 4, step A), and the isolated DNA sample is treated with UDG to digest dU containing nucleic acid molecules that may be present in the sample (FIG. 4, step A). The sample is then subject to a linear amplification reaction, e.g., one or more polymerase extension reactions to generate complementary copies of mutation containing regions of interest. The regions of interest are selectively extended using locus-specific upstream primers, a blocking LNA or PNA probe comprising wild-type sequence, and a deoxynucleotide mix that includes one of more modified nucleotides. In this embodiment, another layer of selectivity can be incorporated into the method by including a 3′ cleavable blocking group (Blk 3′, e.g. C3 spacer), and an RNA base (r), in the upstream primer. Upon target-specific hybridization, RNase H (star symbol) removes the RNA base to liberate a 3′OH group which is a few bases upstream of the mutation, and suitable for polymerase extension (FIG. 4, step B). A blocking LNA or PNA probe comprising wild-type sequence that partially overlaps with the upstream PCR primer will preferentially compete in binding to wild-type sequence over the upstream primer, but not as much to mutant DNA, and thus suppresses extension of wild-type DNA during each round of primer extension. Optionally aliquot sample into 12, 24, 36, 48, or 96 wells prior to the initial extension step.

[0159] The initial extension products incorporate one or more modified nucleotides, such as α-thio-dNTPs, that protect the initial extension products (but not the original cfDNA or genomic DNA) from exonuclease I digestion (FIG. 4, step C). Using just upstream locus-specific primers in the presence of blocking LNA or PNA probes enriches for extension of mutation-containing products with each extension cycle. The exonuclease digestion destroys wild-type DNA present in the original genomic or cfDNA sample, and thus the enriched extension products will not be diluted by subsequent extension or amplification off original wild-type DNA (see step D below).

[0160] As shown in FIG. 4 step D, mutation-specific and locus-specific oligonucleotide primers are added to then perform limited cycle nested PCR to amplify the mutation-containing sequence, if present in the sample. In this embodiment, the upstream mutation-specific primer having a sequence specific for detecting the mutation of interest further contains a 5′ primer-specific portion (Ai) to facilitate subsequent detection of the nested PCR product. Once again, the presence of blocking LNA or PNA probe comprising wild-type sequence suppresses extension of wild-type target sequence if present after the enrichment of mutant sequence during the initial extension step. The reverse locus-specific primer, having a sequence common to both mutant and wild-type sequences contains a 5′ primer-specific portion (Ci) that, together with the 5′ primer specific portion (Ai) of the upstream primer having a sequence specific for detecting the mutation, permit subsequent amplification and detection of only mutant PCR products. As illustrated in step D of FIG. 4, another layer of specificity can be incorporated into the method by including a 3′ cleavable blocking group (Blk 3′, e.g. C3 spacer), and an RNA base (r), in the mutation-specific and locus-specific primers. Upon target-specific hybridization, RNase H (star symbol) removes the RNA base to generate a polymerase extension competent 3′OH group (FIG. 4, step D). In the initial primer extension (step B) the liberated 3′OH base is a few bases upstream from the mutation position, and thus would extend both wild-type and mutant sequences if cleaved (although the blocking LNA or PNA should limit cleavage of primer hybridized to wild-type sequence). In contrast, in the nested PCR (step D), the mutation-specific base of the primer is at the 3′OH base, such that extension on wild-type sequence would be less likely, since the base is mismatched. The specificity for polymerase extension of mutant over wild-type sequence may be further improved by: (i) using mutation-specific PCR Primers containing a mismatch in the 2^{nd} or 3^{rd} position from the 3′OH base, (ii) using LNA or PNA probes to wild-type sequence that would reduce hybridization of mutation-specific PCR primers to wild-type sequences, (iii) using PCR primers to wild-type sequence that are blocked and do not undergo additional amplification, and (iv) avoiding G:T or T:G mismatches between primer and wild-type sequence at the 3′OH base.

[0161] As shown in FIG. 4 step E, nested PCR products comprise a 5′ primer-specific portion (Ai) target-specific sequence, and a 3′ primer-specific portion (Ci′) that permits subsequent amplification of the nested PCR product. Following the limited cycle PCR, the PCR products are aliquoted into separate wells, micro-pores or droplets containing one or more tag-specific primer pairs, each pair comprising matched primers Ai and Ci, treated with UDG or similar enzyme to remove dU containing amplification products or contaminants, PCR amplified, and detected. As shown in FIG. 4, steps F & G, detection of the ligation product can be carried out using traditional TaqMan™ detection assay (see U.S. Pat. No. 6,270,967 to Whitcombe et al., and U.S. Pat. No. 7,601,821 to Anderson et al., which are hereby incorporated by reference in their entirety). For detection using TaqMan™ an oligonucleotide probe spanning the mutation-specific region is used in conjunction with primers suitable for hybridization on the primer-specific portions of the nested PCR products for amplification and detection. The TaqMan™ probe contains a fluorescent reporter group on one end (F1) and a quencher molecule (Q) on the other end that are in close enough proximity to each other in the intact probe that the quencher molecule quenches fluorescence of the reporter group. During amplification, the TaqMan™ probe and upstream primer hybridize to their complementary regions of the nested PCR product. The 5′→3′ nuclease activity of the polymerase extends the hybridized primer and liberates the fluorescent group of the TaqMan™ probe to generate a detectable signal (FIG. 4, step G). In a preferred embodiment, the TaqMan™ probe contains a second quencher group (ZEN) about 9 bases in from the fluorescent reporter group, and the probe is designed such that the ZEN group is at or adjacent to the mutant base. Use of dUTP during the amplification reaction generates products containing dU, which can subsequently be destroyed using UDG for carryover prevention.

[0162] FIG. 5 illustrates an another exPCR-qPCR carryover prevention reaction to detect low-level mutations. Genomic or cfDNA is isolated (FIG. 5, step A), and the isolated DNA sample is treated with UDG to digest dU containing nucleic acid molecules that may be present in the sample (FIG. 5, step A). The sample is then subject to a linear amplification reaction, e.g., one or more polymerase extension reactions to generate complementary copies of mutation containing regions of interest. The regions of interest are selectively extended using locus-specific upstream primers, a blocking LNA or PNA probe comprising wild-type sequence, and a deoxynucleotide mix that includes one of more modified nucleotides. In this embodiment, another layer of selectivity can be incorporated into the method by including a 3′ cleavable blocking group (Blk 3′, e.g. C3 spacer), and an RNA base (r), in the upstream primer. Upon target-specific hybridization, RNase H (star symbol) removes the RNA base to liberate a 3′OH group which is a few bases upstream of the mutation, and suitable for polymerase extension (FIG. 5, step B). A blocking LNA or PNA probe comprising wild-type sequence that partially overlaps with the upstream PCR primer will preferentially compete in binding to wild-type sequence over the upstream primer, but not as much to mutant DNA, and thus suppresses extension of wild-type DNA during each round of primer extension. Optionally aliquot sample into 12, 24, 36, 48, or 96 wells prior to the initial extension step.

[0163] The initial extension products incorporate one or more modified nucleotides, such as α-thio-dNTPs, that protect the initial extension products (but not the original cfDNA or genomic DNA) from exonuclease I digestion (FIG. 5, step C). Using just upstream locus-specific primers in the presence of blocking LNA or PNA probes enriches for extension of mutation-containing products with each extension cycle. The exonuclease digestion destroys wild-type DNA present in the original genomic or cfDNA sample, and thus the enriched extension products will not be diluted by subsequent extension or amplification off original wild-type DNA (see step D below).

[0164] As shown in FIG. 5 step D, mutation-specific and locus-specific oligonucleotide primers are added to then perform limited cycle nested PCR to amplify the mutation-containing sequence, if present in the sample. In this embodiment, the upstream mutation-specific primer having a sequence specific for detecting the mutation of interest further contains a 5′ primer-specific portion (Ai) to facilitate subsequent detection of the nested PCR product. Once again, the presence of blocking LNA or PNA probe comprising wild-type sequence suppresses extension of wild-type target sequence if present after the enrichment of mutant sequence during the initial extension step. The reverse locus-specific primer, having a sequence common to both mutant and wild-type sequences contains a 3′ primer-specific portion (Bi-Ci) that, together with the 5′ primer specific portion (Ai) of the upstream primer having a sequence specific for detecting the mutation, permit subsequent amplification and detection of only mutant PCR products. As illustrated in step D of this Figure, another layer of specificity can be incorporated into the method by including a 3′ cleavable blocking group (Blk 3′, e.g. C3 spacer), and an RNA base (r), in the mutation-specific and locus-specific primers. Upon target-specific hybridization, RNase H (star symbol) removes the RNA base to generate a polymerase extension competent 3′OH group (FIG. 5, step D). In the initial primer extension (step B) the liberated 3′OH base is a few bases upstream from the mutation position, and thus would extend both wild-type and mutant sequences if cleaved (although the blocking LNA or PNA should limit cleavage of primer hybridized to wild-type sequence). In contrast, in the nested PCR (step D), the mutation-specific base of the primer is at the 3′OH base, such that extension on wild-type sequence would be less likely, since the base is mismatched. The specificity for polymerase extension of mutant over wild-type sequence may be further improved by: (i) using mutation-specific PCR Primers containing a mismatch in the 2^{nd} or 3^{rd} position from the 3′OH base, (ii) using LNA or PNA probes to wild-type sequence that would reduce hybridization of mutation-specific PCR primers to wild-type sequences, (iii) using PCR primers to wild-type sequence that are blocked and do not undergo additional amplification, and (iv) avoiding G:T or T:G mismatches between primer and wild-type sequence at the 3′OH base.

[0165] As shown in FIG. 5 step E, nested PCR products comprise a 5′ primer-specific portion (Ai) target-specific sequence, and a 3′ primer-specific portion (Bi′-Ci′) that permits subsequent amplification of the nested PCR product. Following the limited cycle PCR, the PCR products are aliquoted into separate wells, micro-pores or droplets containing one or more tag-specific primer pairs, each pair comprising matched primers F1-Bi-Q-Ai and Ci, treated with UDG or similar enzyme to remove dU containing amplification products or contaminants, PCR amplified (FIG. 5, step F), and detected. PCR amplification results in the formation of double stranded products as shown in FIG. 5, step G. In this example, a polymerase-blocking unit prevents a polymerase from copying the 5′ portion (Bi) of the first universal primer, such that the bottom strand of product cannot form a hairpin when it becomes single-stranded. Formation of such a hairpin would result in the 3′ end of the stem annealing to the amplicon such that polymerase extension of this 3′ end would terminate the PCR reaction.

[0166] The double stranded PCR products are denatured, and when the temperature is subsequently decreased, the upper strand of product forms a hairpin having a stem between the 5′ portion (Bi) of the first oligonucleotide primer and portion Bi′ at the opposite end of the strand (FIG. 5, step H). Also, during this step, the second oligonucleotide primer anneals to the 5′-primer specific portion (Ci′) of the hairpinned product. Upon extension of the second universal primer in step H, 5′ nuclease activity of the polymerase cleaves the detectable label D1 or the quencher molecule from the 5′ end of the amplicon, thereby increasing the distance between the label and the quencher and permitting detection of the label.

[0167] Another aspect of the present application is directed to a method for identifying, in a sample, one or more parent nucleic acid molecules containing a target nucleotide sequence differing from nucleotide sequences of other parent nucleic acid molecules in the sample by one or more nucleotides, one or more copy numbers, one or more transcript sequences, and/or one or more methylated residues. The method involves providing a sample containing one or more parent nucleic acid molecules potentially containing the target nucleotide sequence differing from the nucleotide sequences of other parent nucleic acid molecules by one or more nucleotides, one or more copy numbers, one or more transcript sequences, and/or one or more methylated residues. One or more enzymes capable of digesting deoxyuracil (dU)-containing nucleic acid molecules and one or more nucleases capable of digesting nucleic acid molecules present not comprising modified nucleotides are provided. The method also involves providing one or more primary oligonucleotide primer sets. Each primary oligonucleotide primer set comprises (a) a first primary oligonucleotide primer that comprises a nucleotide sequence that is complementary to a sequence in the parent nucleic acid molecule adjacent to the target nucleotide sequence and (b) a second primary oligonucleotide primer that comprises a nucleotide sequence that is complementary to a portion of an extension product formed from the first primary oligonucleotide primer. The sample, the one or more first primary oligonucleotide primers of the primary oligonucleotide primer sets, the one or more enzymes capable of digesting deoxyuracil (dU)-containing nucleic acid molecules, a deoxynucleotide mix that comprises one or more modified nucleotides that protect extension product but not target DNA from nuclease digestion, and a DNA polymerase are blended to form one or more polymerase extension reaction mixtures, and the one or more polymerase extension reaction mixtures are subjected to conditions suitable for digesting deoxyuracil (dU)-containing nucleic acid molecules present in the polymerase extension reaction mixtures and for carrying out one or more polymerase extension reaction cycles comprising a denaturation treatment, a hybridization treatment, and an extension treatment, thereby forming primary extension products comprising the complement of the target nucleotide sequence. The method further comprises blending the one or more polymerase extension reaction mixtures comprising the primary extension products, the one or more second primary oligonucleotide primers of the one or more primary oligonucleotide primer sets, the one or more nucleases, a deoxynucleotide mix, and a DNA polymerase to form one or more first polymerase chain reaction mixtures. The one or more first polymerase chain reaction mixtures are subjected to conditions suitable for digesting nucleic acid molecules present in the polymerase chain reaction mixtures, but not primary extension products comprising modified nucleotides and for carrying out two or more polymerase chain reaction cycles comprising a denaturation treatment, a hybridization treatment, and an extension treatment, thereby forming first polymerase chain reaction products comprising the target nucleotide sequence or a complement thereof. One or more secondary oligonucleotide primer sets are then provided. Each secondary oligonucleotide primer set comprises (a) a first secondary oligonucleotide primer having a 3′ portion that is complementary to a portion of an extension product formed from the first primary oligonucleotide primer and (b) a second secondary oligonucleotide primer having a 3′ portion that comprises a nucleotide sequence that is complementary to a portion of an extension product formed from the first secondary oligonucleotide primer. The first polymerase chain reaction products, the one or more secondary oligonucleotide primer sets, the one or more enzymes capable of digesting deoxyuracil (dU) containing nucleic acid molecules, a deoxynucleotide mix including dUTP, and a DNA polymerase are blended to form one or more second polymerase chain reaction mixtures. The one or more second polymerase chain reaction mixtures are subjected to conditions suitable for digesting deoxyuracil (dU)-containing nucleic acid molecules present in the second polymerase chain reaction mixtures and for carrying out two or more polymerase chain reaction cycles comprising a denaturation treatment, a hybridization treatment, and an extension treatment thereby forming second polymerase chain reaction products. The method further comprises detecting and distinguishing the second polymerase chain reaction products in the one or more second polymerase chain reaction mixtures to identify the presence of one or more parent nucleic acid molecules containing target nucleotide sequences differing from nucleotide sequences in other parent nucleic acid molecules in the sample by one or more nucleotides, one or more copy numbers, one or more transcript sequences, and/or one or more methylated residues.

[0168] FIGS. 6, 7, and 8 illustrate various embodiments of this aspect of the present application.

[0169] FIG. 6 illustrates another exemplary exPCR-qPCR carryover prevention reaction to detect low-level mutations. Genomic or cfDNA is isolated (FIG. 6, step A), and the isolated DNA sample is treated with UDG to digest dU containing nucleic acid molecules that may be present in the sample (FIG. 6, step A). The sample is then subject to a linear amplification reaction, e.g., one or more polymerase extension reactions to generate complementary copies of mutation containing regions of interest. The regions of interest are selectively extended using locus-specific upstream primers, a blocking LNA or PNA probe comprising wild-type sequence, and a deoxynucleotide mix that includes one of more modified nucleotides. In this embodiment, another layer of selectivity can be incorporated into the method by including a 3′ cleavable blocking group (Blk 3′, e.g. C3 spacer), and an RNA base (r), in the upstream primer. Upon target-specific hybridization, RNase H (star symbol) removes the RNA base to liberate a 3′OH group which is a few bases upstream of the mutation, and suitable for polymerase extension (FIG. 6, step B). A blocking LNA or PNA probe comprising wild-type sequence that partially overlaps with the upstream PCR primer will preferentially compete in binding to wild-type sequence over the upstream primer, but not as much to mutant DNA, and thus suppresses extension of wild-type DNA during each round of primer extension. The initial extension products incorporate one or more modified nucleotides, such as α-thio-dNTPs, that protect the initial extension products (but not the original cfDNA or genomic DNA) from exonuclease I digestion (FIG. 6, step B). Optionally aliquot sample into 12, 24, 36, 48, or 96 wells prior to the initial extension step.

[0170] Subsequently, the locus-specific downstream primers are added, followed by limited cycle PCR (8 to 12 cycles, FIG. 6, step C). In the preferred embodiment, the locus-specific downstream primers are approximately 20 to 40 bases downstream from the locus-specific upstream primers. Optionally, the downstream primers contain identical 8-11 base tails to prevent primer dimers.

[0171] Following the limited cycle PCR, the PCR products are aliquoted into separate wells, micro-pores or droplets containing Taqman™ probes, mutation-specific, and locus-specific primers, to amplify the mutation-containing sequence, if present in the sample (FIG. 6, step D). Once again, the presence of blocking LNA or PNA probe comprising wild-type sequence suppresses extension of wild-type target sequence if present after the enrichment of mutant sequence during the initial extension-amplification steps (FIG. 6, steps B & C). As illustrated in step D of this FIG. 6, another layer of specificity can be incorporated into the method by including a 3′ cleavable blocking group (Blk 3′, e.g. C3 spacer), and an RNA base (r), in the mutation-specific and locus-specific primers. Upon target-specific hybridization, RNase H (star symbol) removes the RNA base to generate a polymerase extension competent 3′OH group (FIG. 6, step D). In the initial primer extension (step B), the liberated 3′OH is a few bases upstream from the mutation position, and thus would extend both wild-type and mutant sequences if cleaved (although the blocking LNA or PNA should limit cleavage of primer hybridized to wild-type sequence). In contrast, in the nested PCR (step D), the mutation-specific base of the primer is at the 3′OH, such that extension on wild-type sequence would be less likely, since the base is mismatched. The specificity for polymerase extension of mutant over wild-type sequence may be further improved by: (i) using mutation-specific PCR Primers containing a mismatch in the 2^{nd} or 3^{rd} position from the 3′OH base, (ii) using LNA or PNA probes to wild-type sequence that would reduce hybridization of mutation-specific PCR primers to wild-type sequences, (iii) using PCR primers to wild-type sequence that are blocked and do not undergo additional amplification, and (iv) avoiding G:T or T:G mismatches between primer and wild-type sequence at the 3′OH base. The TaqMan™ probe spans the mutation region and contains a fluorescent reporter group on one end (F1) and a quencher molecule (Q) on the other end that are in close enough proximity to each other in the intact probe that the quencher molecule quenches fluorescence of the reporter group. During amplification, the TaqMan™ probe and upstream primer hybridize to their complementary regions of the initial PCR product. The 5′→3′ nuclease activity of the polymerase extends the hybridized primer and liberates the fluorescent group of the TaqMan™ probe to generate a detectable signal (FIG. 6, step E). In a preferred embodiment, the Taqman™ probe contains a second quencher group (ZEN) about 9 bases in from the fluorescent reporter group, and the probe is designed such that the ZEN group is at or adjacent to the mutant base. Use of dUTP during the amplification reaction generates products containing dU, which can subsequently be destroyed using UDG for carryover prevention

[0172] FIGS. 7 and 8 illustrate additional exemplary exPCR-qPCR carryover prevention reaction to detect low-level mutations. Genomic or cfDNA is isolated (FIGS. 7 and 8, step A), and the isolated DNA sample is treated with UDG to digest dU containing nucleic acid molecules that may be present in the sample (FIG. 7, step A). The regions of interest are selectively extended using locus-specific upstream primers, a blocking LNA or PNA probe comprising wild-type sequence, and a deoxynucleotide mix that includes one of more modified nucleotides. In this embodiment, another layer of selectivity can be incorporated into the method by including a 3′ cleavable blocking group (Blk 3′, e.g. C3 spacer), and an RNA base (r), in the upstream primer. Upon target-specific hybridization, RNase H (star symbol) removes the RNA base to liberate a 3′OH group which is a few bases upstream of the mutation, and suitable for polymerase extension (FIGS. 7 and 8, step B). A blocking LNA or PNA probe comprising wild-type sequence that partially overlaps with the upstream PCR primer will preferentially compete in binding to wild-type sequence over the upstream primer, but not as much to mutant DNA, and thus suppresses extension of wild-type DNA during each round of primer extension. The initial extension products incorporate one or more modified nucleotides, such as α-thio-dNTPs, that protect the initial extension products (but not the original cfDNA or genomic DNA) from exonuclease I digestion (FIGS. 7 and 8, step B). Optionally aliquot sample into 12, 24, 36, 48, or 96 wells prior to the initial extension step. Subsequently, the locus-specific downstream primers are added, followed by limited cycle PCR (8 to 12 cycles, FIGS. 7 and 8, step B).

[0173] For the protocol illustrated in FIG. 7, following the limited cycle PCR, the PCR products are aliquoted into separate wells, micro-pores or droplets containing Taqman™ probes, mutation-specific primers comprising 5′ primer-specific portions (Ai), locus-specific primers comprising 5′ primer-specific portions (Ci) and matching primers Ai and Ci. These primers combine to amplify the mutation-containing sequence, if present in the sample (FIG. 7, step C). Once again, the presence of blocking LNA or PNA probe comprising wild-type sequence suppresses extension of wild-type target sequence if present after the enrichment of mutant sequence during the initial extension-amplification steps (FIG. 7, step B). As illustrated in step C of this Figure, another layer of specificity can be incorporated into the method by including a 3′ cleavable blocking group (Blk 3′, e.g. C3 spacer), and an RNA base (r), in the mutation-specific and locus-specific primers. Upon target-specific hybridization, RNase H (star symbol) removes the RNA base to generate a polymerase extension competent 3′OH group (FIG. 7, step C). In the initial primer extension (step B) the liberated 3′OH is a few bases upstream from the mutation position, and thus would extend both wild-type and mutant sequences if cleaved (although the blocking LNA or PNA should limit cleavage of primer hybridized to wild-type sequence). In contrast, in the combined Taqman™—universal tag PCR amplification (steps C-F), the mutation-specific base of the upstream primer is at the 3′OH, such that extension on wild-type sequence would be less likely, since the base is mismatched. Following the mutation-specific and locus-specific extensions to generate products comprising the Ai tag sequence, target-specific sequence and Ci′ tag sequence (FIG. 7, step D), the products can be detected by the pairs of matched primers Ai and Ci, and TaqMan™ probes that span the ligation junction as described supra for FIG. 4 steps F-G (see FIG. 7, steps E & F), or using other suitable means known in the art. The specificity for polymerase extension of mutant over wild-type sequence may be further improved by: (i) using mutation-specific PCR Primers containing a mismatch in the 2^{nd} or 3^{rd} position from the 3′OH base, (ii) using LNA or PNA probes to wild-type sequence that would reduce hybridization of mutation-specific PCR primers to wild-type sequences, (iii) using PCR primers to wild-type sequence that are blocked and do not undergo additional amplification, and (iv) avoiding G:T or T:G mismatches between primer and wild-type sequence at the 3′OH base. Further, the longer target-specific primers are at a significantly lower concentration than the Taqman™ probe and tag-specific primers (Ai, Ci), such that the longer mutation-specific primers are depleted, allowing the Taqman™ probe and tag-specific primers to hybridize and enable target-dependent detection.

[0174] For the protocol illustrated in FIG. 8, following the limited cycle PCR, the PCR products are aliquoted into separate wells, micro-pores, or droplets containing Taqman™ probes, mutation-specific primers comprising 5′ primer-specific portions (Ai), locus-specific primers comprising 5′ primer-specific portions (Bi-Ci) and matching UniTaq primers F1-Bi-Q-Ai and Ci. These primers combine to amplify the mutation-containing sequence, if present in the sample (FIG. 8, step C). Once again, the presence of blocking LNA or PNA probe comprising wild-type sequence suppresses extension of wild-type target sequence if present after the enrichment of mutant sequence during the initial extension-amplification steps (FIG. 8, step B). As illustrated in step C of this Figure, another layer of specificity can be incorporated into the method by including a 3′ cleavable blocking group (Blk 3′, e.g. C3 spacer), and an RNA base (r), in the mutation-specific and locus-specific primers. Upon target-specific hybridization, RNase H (star symbol) removes the RNA base to generate a polymerase extension competent 3′OH group (FIG. 8, step C). In the initial primer extension (step B) the liberated 3′OH is a few bases upstream from the mutation position, and thus would extend both wild-type and mutant sequences if cleaved (although the blocking LNA or PNA should limit cleavage of primer hybridized to wild-type sequence). In contrast, in the combined Taqman™—UniTaq PCR amplification (steps C-G), the mutation-specific base of the upstream primer is at the 3′OH, such that extension on wild-type sequence would be less likely, since the base is mismatched. Following the mutation-specific and locus-specific extensions to generate products comprising the Ai tag sequence, target-specific sequence and Bi′-Ci′ tag sequence (FIG. 8, step D), the products can be detected by the pairs of matched UniTaq primers (i.e. F1-Bi-Q-Ai and Ci), as described supra for FIG. 5 steps F-H (see FIG. 8, steps E-G), or using other suitable means known in the art. The specificity for polymerase extension of mutant over wild-type sequence may be further improved by: (i) using mutation-specific PCR Primers containing a mismatch in the 2^{nd} or 3^{rd} position from the 3′OH base, (ii) using LNA or PNA probes to wild-type sequence that would reduce hybridization of mutation-specific PCR primers to wild-type sequences, (iii) using PCR primers to wild-type sequence that are blocked and do not undergo additional amplification, and (iv) avoiding G:T or T:G mismatches between primer and wild-type sequence at the 3′OH base. Further, the longer target-specific primers are at a significantly lower concentration than the UniTaq primers (F1-Bi-Q-Ai, Ci), such that the longer mutation-specific primers are depleted, allowing the UniTaq primers to hybridize and enable target-dependent detection.

[0175] Another aspect of the present application is directed to a method for identifying, in a sample, one or more parent nucleic acid molecules containing a target nucleotide sequence differing from nucleotide sequences in other parent nucleic acid molecules in the sample by one or more methylated residues. The method involves providing a sample containing one or more parent nucleic acid molecules potentially containing the target nucleotide sequence differing from the nucleotide sequences in other parent nucleic acid molecules by one or more methylated residues and subjecting the nucleic acid molecules in the sample to a bisulfite treatment under conditions suitable to convert unmethylated cytosine residues to uracil residues. One or more enzymes capable of digesting deoxyuracil (dU)-containing nucleic acid molecules are then provided. The method further involves providing one or more primary oligonucleotide primer sets. Each primary oligonucleotide primer set comprises (a) a first primary oligonucleotide primer that comprises a nucleotide sequence that is complementary to a sequence in the bisulfite-treated parent nucleic acid molecules adjacent to the bisulfite-treated target nucleotide sequence containing the one or more methylated residue and (b) a second primary oligonucleotide primer that comprises a nucleotide sequence that is complementary to a portion of an extension product formed from the first primary oligonucleotide primer. The bisulfite-treated sample, the one or more first primary oligonucleotide primers of the one or more primary oligonucleotide primer sets, a deoxynucleotide mix, and a DNA polymerase are blended to form one or more polymerase extension reaction mixtures, and the one or more polymerase extension reaction mixtures are subjected to conditions suitable for one or more polymerase extension reaction cycles comprising a denaturation treatment, a hybridization treatment, and an extension treatment, thereby forming primary extension products comprising the complement of the bisulfite-treated target nucleotide sequence. The one or more polymerase extension reaction mixtures comprising the primary extension products, the one or more secondary primary oligonucleotide primers of the one or more primary oligonucleotide primer sets, the one or more enzymes capable of digesting deoxyuracil (dU)-containing nucleic acid molecules, a deoxynucleotide mix including dUTP, and a DNA polymerase are blended to form one or more first polymerase chain reaction mixtures. The one or more first polymerase chain reaction mixtures are subjected to conditions suitable for digesting deoxyuracil (dU)-containing nucleic acid molecules present in the first polymerase chain reaction mixtures and for carrying out one or more polymerase chain reaction cycles comprising a denaturation treatment, a hybridization treatment, and an extension treatment, thereby forming first polymerase chain reaction products comprising the bisulfite-treated target nucleotide sequence or a complement thereof. The method further involves providing one or more oligonucleotide probe sets. Each probe set comprises (a) a first oligonucleotide probe having a 5′ primer-specific portion and a 3′ bisulfite-treated target nucleotide sequence-specific or complement sequence-specific portion, and (b) a second oligonucleotide probe having a 5′ bisulfite-treated target nucleotide sequence-specific or complement sequence-specific portion and a 3′ primer-specific portion, and wherein the first and second oligonucleotide probes of a probe set are configured to hybridize, in a base specific manner, on a complementary nucleotide sequence of a first polymerase chain reaction product. The first polymerase chain reaction products are blended with a ligase and the one or more oligonucleotide probe sets to form one or more ligation reaction mixtures. The one or more ligation reaction mixtures are subjected to one or more ligation reaction cycles whereby the first and second oligonucleotide probes of the one or more oligonucleotide probe sets are ligated together, when hybridized to complementary sequences, to form ligated product sequences in the ligation reaction mixture wherein each ligated product sequence comprises the 5′ primer-specific portion, the bisulfite-treated target nucleotide sequence-specific or complement sequence-specific portions, and the 3′ primer-specific portion. The method further comprises providing one or more secondary oligonucleotide primer sets. Each secondary oligonucleotide primer set comprises (a) a first secondary oligonucleotide primer comprising the same nucleotide sequence as the 5′ primer-specific portion of the ligated product sequence and (b) a second secondary oligonucleotide primer comprising a nucleotide sequence that is complementary to the 3′ primer-specific portion of the ligated product sequence. The ligated product sequences, the one or more secondary oligonucleotide primer sets, the one or more enzymes capable of digesting deoxyuracil (dU)-containing nucleic acid molecules, a deoxynucleotide mix including dUTP, and a DNA polymerase are blended to form one or more second polymerase chain reaction mixtures, and the one or more second polymerase chain reaction mixtures are subjected to conditions suitable for digesting deoxyuracil (dU)-containing nucleic acid molecules present in the second polymerase chain reaction mixtures and for carrying out one or more polymerase chain reaction cycles comprising a denaturation treatment, a hybridization treatment, and an extension treatment thereby forming a second polymerase chain reaction products. The method further involves detecting and distinguishing the second polymerase chain reaction products in the one or more second polymerase chain reaction mixtures to identify the presence of one or more nucleic acid molecules containing target nucleotide sequences differing from nucleotide sequences in other parent nucleic acid molecules in the sample by one or more methylated residues.

[0176] FIGS. 9 and 10 illustrate exPCR-LDR-qPCR carryover prevention reaction to detect low-level methylation in accordance with this aspect of the present application. The steps are similar to those steps described for FIG. 2, with two key differentiators. First, after isolating the genomic or cfDNA, it is optionally treated with a DNA repair kit prior to bisulfite conversion (FIGS. 9 and 10, Step A). Bisulfite converts unmethylated cytosines, but not 5-methyl cytosines (5meC) nor 5-hydroxymethyl cytosine (5hmC) into a uracil base, which base-pairs with A. Thus, after a single cycle of PCR amplification, unmethylated Cm but not 5meC nor 5hmC is converted to a “T” base, thus allowing for both modified forms of cytosine to be distinguished from unmodified cytosine. Second, the regions of interest are selectively extended using locus-specific downstream primers (with optional identical 8-11 base tails), and a deoxynucleotide mix that does NOT include dUTP. In this embodiment, another layer of selectivity can be incorporated into the method by including a 3′ cleavable blocking group (Blk 3′, e.g. C3 spacer), and an RNA base (r), in the downstream primer. Upon target-specific hybridization, RNase H (star symbol) removes the RNA base to liberate a 3′OH group which is suitable for polymerase extension (FIG. 9, step B). Add UDG, which destroys the bisulfite converted DNA (but not the primer extension products). Optionally aliquot sample into 12, 24, 36, 48, or 96 wells prior to the initial extension step. Subsequently, the locus-specific upstream primers are added, followed by limited (8 to 20 cycles) or full (20-40 cycles) PCR using a deoxynucleotide mix that includes dUTP (FIG. 9, step C). Upon target-specific hybridization, RNase H removes the RNA base to liberate a 3′OH group which is a few bases upstream of the bisulfite converted methylated target base, and suitable for polymerase extension (FIG. 9, step C). A blocking LNA or PNA probe comprising the bisulfite converted unmethylated sequence (or its complement) that partially overlaps with the upstream PCR primer will preferentially compete for binding to the bisulfite converted unmethylated sequence over the upstream primer, thus suppressing amplification of bisulfite converted unmethylated sequence DNA during each round of PCR. Optionally, the downstream primers contain identical 8-11 base tails to prevent primer dimers. Further, such tails provide the option for asymmetric PCR at the end of the PCR cycles, by raising the hybridization temperature above that for the forward primers, but at or below that for the reverse primers—which at 8-11 bases longer will have higher Tm values. This generates more bottom strand products, which are suitable substrates for the subsequent LDR step. The amplified products contain dU as shown in FIG. 9, step D, which allows for subsequent treatment with UDG or a similar enzyme for carryover prevention.

[0177] Alternatively, as shown in FIG. 10, the regions of interest are selectively extended using locus-specific upstream primers, a blocking LNA or PNA probe comprising bisulfite converted unmethylated sequence (or its complement), and a deoxynucleotide mix that does NOT include dUTP. In this embodiment, another layer of selectivity can be incorporated into the method by including a 3′ cleavable blocking group (Blk 3′, e.g. C3 spacer), and an RNA base (r), in the upstream primer. Upon target-specific hybridization, RNase H (star symbol) removes the RNA base to liberate a 3′OH group which is a few bases upstream of the bisulfite converted methylated target base, and suitable for polymerase extension (FIG. 10, step B). A blocking LNA or PNA probe comprising the bisulfite converted unmethylated sequence (or its complement) that partially overlaps with the upstream PCR primer will preferentially compete for binding to the bisulfite converted unmethylated sequence over the upstream primer, thus suppressing amplification of bisulfite converted unmethylated sequence DNA during each round of PCR. Add UDG, which destroys the bisulfite converted DNA (but not the primer extension products). Optionally aliquot sample into 12, 24, 36, 48, or 96 wells prior to the initial extension step. Subsequently, the locus-specific downstream primers are added, followed by limited (8 to 20 cycles) or full (20-40 cycles) PCR using a deoxynucleotide mix that includes dUTP (FIG. 14, step C). Optionally, the downstream primers contain identical 8-11 base tails to prevent primer dimers.

[0178] For FIGS. 9 and 10, methylation-specific upstream and locus-specific downstream probes containing tails (Ai, Ci′) enable formation of a ligation product in the presence of bisulfite converted methylated base-containing PCR products. Following ligation, the ligation products can be detected using pairs of matched primers Ai and Ci, and TaqMan™ probes that span the ligation junction as described supra for FIG. 2 (see FIG. 9, steps E-H), or using other suitable means known in the art.

[0179] Alternatively, methylation-specific upstream and locus-specific downstream probes containing tails (Ai, Bi′-Ci′) enable formation of a ligation product in the presence of bisulfite converted methylated base-containing PCR products. Following ligation, the ligation products are amplified using UniTaq-specific primers (i.e., F1-Bi-Q-Ai, Ci) and detected as described supra for FIG. 3, or using other suitable means known in the art.

[0180] Another aspect of the present application is directed to a method for identifying, in a sample, one or more parent nucleic acid molecules containing a target nucleotide sequence differing from nucleotide sequences in other parent nucleic acid molecules in the sample by one or more methylated residues. The method involves providing a sample containing one or more parent nucleic acid molecules potentially containing the target nucleotide sequence differing from the nucleotide sequences in other parent nucleic acid molecules by one or more methylated residues. The nucleic acid molecules in the sample are subjected to a bisulfite treatment under conditions suitable to convert unmethylated cytosine residues to uracil residues. One or more enzymes capable of digesting deoxyuracil (dU)-containing nucleic acid molecules are provided, and one or more first primary oligonucleotide primer(s) are provided. Each first primary oligonucleotide primer comprises a nucleotide sequence that is complementary to a sequence in the bisulfite-treated parent nucleic acid molecules adjacent to the bisulfite-treated target nucleotide sequence containing the one or more methylated residue. The bisulfite-treated sample, the one or more first primary oligonucleotide primers, a deoxynucleotide mix, and a DNA polymerase are blended to form one or more polymerase extension reaction mixtures, and the one or more polymerase extension reaction mixtures are subjected to conditions suitable for one or more polymerase extension reaction cycles comprising a denaturation treatment, a hybridization treatment, and an extension treatment, to form primary extension products comprising the complement of the bisulfite-treated target nucleotide sequence. The method further comprises providing one or more secondary oligonucleotide primer sets. Each secondary oligonucleotide primer set comprises (a) a first secondary oligonucleotide primer having a 5′ primer-specific portion and a 3′ portion that is complementary to a portion of the polymerase extension reaction product formed from the first primary oligonucleotide primer and (b) a second secondary oligonucleotide primer having a 5′ primer-specific portion and a 3′ portion that comprises a nucleotide sequence that is complementary to a portion of an extension product formed from the first secondary oligonucleotide primer. The one or more polymerase extension reaction mixtures comprising the primary extension products, the one or more secondary oligonucleotide primer sets, the one or more enzymes capable of digesting deoxyuracil (dU)-containing nucleic acid molecules, a deoxynucleotide mix, and a DNA polymerase are blended to form one or more first polymerase chain reaction mixtures, and the one or more first polymerase chain reaction mixtures are subjected to conditions suitable for digesting nucleic acid molecules present in the first polymerase chain reaction mixtures, but not primary extension products comprising modified nucleotides and for carrying out two or more polymerase chain reaction cycles comprising a denaturation treatment, a hybridization treatment, and an extension treatment, thereby forming first polymerase chain reactions products comprising a 5′ primer-specific portion of the first secondary oligonucleotide primer, the bisulfite-treated target nucleotide sequence-specific or complement sequence-specific portion, and a complement of the 5′ primer-specific portion of the second secondary oligonucleotide primer. The method further involves providing one or more tertiary oligonucleotide primer sets. Each tertiary oligonucleotide primer set comprises (a) a first tertiary oligonucleotide primer comprising the same nucleotide sequence as the 5′ primer-specific portion of the first polymerase chain reaction products and (b) a second tertiary oligonucleotide primer comprising a nucleotide sequence that is complementary to the 3′ primer-specific portion of the first polymerase chain reactions product sequence. The first polymerase chain reaction products, the one or more tertiary oligonucleotide primer sets, the one or more enzymes capable of digesting deoxyuracil (dU) containing nucleic acid molecules, a deoxynucleotide mix including dUTP, and a DNA polymerase are blended to form one or more second polymerase chain reaction mixtures. The one or more second polymerase chain reaction mixtures are subjected to conditions suitable for digesting deoxyuracil (dU)-containing nucleic acid molecules present in the second polymerase chain reaction mixtures and for carrying out one or more polymerase chain reaction cycles comprising a denaturation treatment, a hybridization treatment, and an extension treatment thereby forming secondary polymerase chain reaction products. The method further involves detecting and distinguishing the secondary polymerase chain reactions products in the one or more second polymerase chain reaction mixtures to identify the presence of one or more parent nucleic acid molecules containing target nucleotide sequences differing from nucleotide sequences in other parent nucleic acid molecules in the sample by one or more methylated residues.

[0181] FIGS. 11, 12, 18, and 19 illustrate various embodiments of this aspect of the present application.

[0182] FIG. 11 illustrates an exemplary exPCR-qPCR carryover prevention reaction to detect low-level methylations. Genomic or cfDNA is isolated and is optionally treated with a DNA repair kit prior to bisulfite conversion (FIG. 11, Step A). The regions of interest are selectively extended using locus-specific downstream primers (with optional identical 8-11 base tails), and a deoxynucleotide mix that does NOT include dUTP. In this embodiment, another layer of selectivity can be incorporated into the method by including a 3′ cleavable blocking group (Blk 3′, e.g. C3 spacer), and an RNA base (r), in the downstream primer. Upon target-specific hybridization, RNase H (star symbol) removes the RNA base to liberate a 3′OH group which is suitable for polymerase extension (FIG. 11, step B). If the locus-specific downstream primer covers one or more methylation sites, another layer of specificity may be added by using blocking primers whose sequence corresponds to the bisulfite-converted unmethylated sequence. After the extension cycles, add UDG, which destroys the bisulfite converted DNA (but not the primer extension products). Optionally aliquot sample into 12, 24, 36, 48, or 96 wells prior to the initial extension step.

[0183] Alternatively, as shown in FIG. 12, regions of interest are selectively extended using locus-specific upstream primers, a blocking LNA or PNA probe comprising bisulfite converted unmethylated sequence (or its complement), and a deoxynucleotide mix that does not include dUTP. In this embodiment, another layer of selectivity can be incorporated into the method by including a 3′ cleavable blocking group (Blk 3′, e.g. C3 spacer), and an RNA base (r), in the upstream primer. Upon target-specific hybridization, RNase H (star symbol) removes the RNA base to liberate a 3′OH group which is a few bases upstream of the bisulfite converted methylated target base, and suitable for polymerase extension (FIG. 12, step B). A blocking LNA or PNA probe comprising the bisulfite converted unmethylated sequence (or its complement) that partially overlaps with the upstream PCR primer will preferentially compete for binding to the bisulfite converted unmethylated sequence over the upstream primer, thus suppressing amplification of bisulfite converted unmethylated sequence DNA during each round of PCR. Add UDG, which destroys the bisulfite converted DNA (but not the primer extension products). Optionally aliquot sample into 12, 24, 36, 48, or 96 wells prior to the initial extension step.

[0184] As shown in FIGS. 11 and 12 step C, bisulfite converted methylation base-specific primers (comprising 5′ primer-specific portions Ai) and bisulfite converted locus-specific primers (comprising 5′ primer-specific portions Ci) are added to then perform limited cycle nested PCR to amplify the bisulfite converted methylation-containing sequence, if present in the sample. Blocking LNA or PNA probes comprising the bisulfite converted unmethylated sequence (or its complement) enables amplification of originally methylated but not originally un-methylated allele. Primers are unblocked with RNaseH2 only when bound to correct target. Following PCR, the products can be detected using pairs of matched primers Ai and Ci, and TaqMan™ probes that span the bisulfite-converted methylation target regions as described supra for FIG. 4 (see FIGS. 11 and 12, steps D-F), or using other suitable means known in the art.

[0185] Alternatively, bisulfite converted methylation base-specific primers (comprising 5′ primer-specific portions Ai) and bisulfite converted locus-specific primers (comprising 5′ primer-specific portions Bi-Ci) are added to then perform limited cycle nested PCR to amplify the bisulfite converted methylation-containing sequence, if present in the sample. Blocking LNA or PNA probes comprising the bisulfite converted unmethylated sequence (or its complement) enables amplification of originally methylated but not originally un-methylated alleles. Primers are unblocked with RNaseH2 only when bound to correct target. Following PCR, the products are amplified using UniTaq-specific primers (i.e., F1-Bi-Q-Ai, Ci) and detected as described supra for FIG. 5, or using other suitable means known in the art.

[0186] Another aspect of the present application is directed to a method for identifying, in a sample, one or more parent nucleic acid molecules containing a target nucleotide sequence differing from nucleotide sequences in other parent nucleic acid molecules in the sample by one or more methylated residues. The method involves providing a sample containing one or more parent nucleic acid molecules potentially containing the target nucleotide sequence differing from the nucleotide sequences in other parent nucleic acid molecules by one or more methylated residues. The nucleic acid molecules in the sample are subjected to a bisulfite treatment under conditions suitable to convert unmethylated cytosine residues to uracil residues. One or more enzymes capable of digesting deoxyuracil (dU)-containing nucleic acid molecules present in the sample are provided, and one or more primary oligonucleotide primer sets are provided. Each primary oligonucleotide primer set comprises (a) a first primary oligonucleotide primer that comprises a nucleotide sequence that is complementary to a sequence in the bisulfite-treated parent nucleic acid molecules adjacent to the bisulfite-treated target nucleotide sequence containing the one or more methylated residue and (b) a second primary oligonucleotide primer that comprises a nucleotide sequence that is complementary to a portion of an extension product formed from the first primary oligonucleotide primer. The bisulfite-treated sample, the one or more first primary oligonucleotide primers of the one or more primary oligonucleotide primer sets, a deoxynucleotide mix, and a DNA polymerase are blended to form one or more polymerase extension reaction mixtures. The one or more polymerase extension reaction mixtures to are subjected to conditions suitable for one or more polymerase extension reaction cycles comprising a denaturation treatment, a hybridization treatment, and an extension treatment, thereby forming primary extension products comprising the complement of the bisulfite treated target nucleotide sequence. The one or more polymerase extension reaction mixtures comprising the primary extension products, the one or more secondary primary oligonucleotide primers of the one or more primary oligonucleotide primer sets, the one or more enzymes capable of digesting deoxyuracil (dU)-containing nucleic acid molecules in the reaction mixture, a deoxynucleotide mix, and a DNA polymerase are blended to form one or more first polymerase chain reaction mixtures. The one or more first polymerase chain reaction mixtures are subjected to conditions suitable for digesting deoxyuracil (dU)-containing nucleic acid molecules present in the first polymerase chain reaction mixtures and for carrying out one or more polymerase chain reaction cycles comprising a denaturation treatment, a hybridization treatment, and an extension treatment, thereby forming first polymerase chain reaction products comprising the bisulfite-treated target nucleotide sequence or a complement thereof. The method further comprises providing one or more secondary oligonucleotide primer sets. Each secondary oligonucleotide primer set comprises (a) a first secondary oligonucleotide primer having a 3′ portion that is complementary to a portion of a first polymerase chain reaction product formed from the first primary oligonucleotide primer and (b) a second secondary oligonucleotide primer having a 3′ portion that comprises a nucleotide sequence that is complementary to a portion of a first polymerase chain reaction product formed from the first secondary oligonucleotide primer. The first polymerase chain reaction products, the one or more secondary oligonucleotide primer sets, the one or more enzymes capable of digesting deoxyuracil (dU)-containing nucleic acid molecules, a deoxynucleotide mix including dUTP, and a DNA polymerase are blended to form one or more second polymerase chain reaction mixtures. The one or more second polymerase chain reaction mixtures are subjected to conditions suitable for digesting deoxyuracil (dU)-containing nucleic acid molecules present in the second polymerase chain reaction mixtures and for carrying out two or more polymerase chain reaction cycles comprising a denaturation treatment, a hybridization treatment, and an extension treatment thereby forming second polymerase chain reaction products. The method further involves detecting and distinguishing the second polymerase chain reactions products in the one or more second polymerase chain reaction mixtures to identify the presence of one or more parent nucleic acid molecules containing target nucleotide sequences differing from nucleotide sequences in other parent nucleic acid molecules in the sample by one or more methylated residues.

[0187] FIGS. 13-15, 20, and 21 illustrate various embodiments of this aspect of the present application.

[0188] FIG. 13 illustrates another exemplary exPCR-qPCR carryover prevention reaction to detect low-level methylation. Genomic or cfDNA is isolated, and optionally treated with a DNA repair kit prior to bisulfite conversion (FIG. 13, Step A). The regions of interest are selectively extended using locus-specific downstream primers (with optional identical 8-11 base tails), and a deoxynucleotide mix that does NOT include dUTP. In this embodiment, another layer of selectivity can be incorporated into the method by including a 3′ cleavable blocking group (Blk 3′, e.g. C3 spacer), and an RNA base (r), in the downstream primer. Upon target-specific hybridization, RNase H (star symbol) removes the RNA base to liberate a 3′OH group which is suitable for polymerase extension (FIG. 13, step B). If the locus-specific downstream primer covers one or more methylation sites, another layer of specificity may be added by using blocking primers whose sequence corresponds to the bisulfite-converted unmethylated sequence. After the extension cycles, add UDG, which destroys the bisulfite converted DNA (but not the primer extension products). Optionally aliquot sample into 12, 24, 36, 48, or 96 wells prior to the initial extension step. Subsequently, the regions of interest are selectively amplified in a limited cycle PCR (8-20 cycles) using locus-specific upstream primers, a blocking LNA or PNA probe comprising bisulfite converted unmethylated sequence (or its complement), and a deoxynucleotide mix that does not include dUTP. In this embodiment, another layer of selectivity can be incorporated into the method by including a 3′ cleavable blocking group (Blk 3′, e.g. C3 spacer), and an RNA base (r), in the upstream primer. Upon target-specific hybridization, RNase H (star symbol) removes the RNA base to liberate a 3′OH group which is a few bases upstream of the bisulfite converted methylated target base, and suitable for polymerase extension (FIG. 13, step C). A blocking LNA or PNA probe comprising the bisulfite converted unmethylated sequence (or its complement) that partially overlaps with the upstream PCR primer will preferentially compete for binding to the bisulfite converted unmethylated sequence over the upstream primer, thus suppressing amplification of bisulfite converted unmethylated sequence DNA during each round of PCR.

[0189] Following the limited cycle PCR, the PCR products are aliquoted into separate wells, micro-pores or droplets containing Taqman™ probes, bisulfite-converted, methylation base-specific, and bisulfite converted locus-specific primers, to amplify the bisulfite converted methylation-containing sequence, if present in the sample (FIG. 13, step D) The bisulfite converted methylation-containing products are amplified and detected as described supra for FIG. 6 (see FIG. 13, steps D-E), or using other suitable means known in the art.

[0190] FIGS. 14 and 15 illustrate additional exemplary exPCR-qPCR carryover prevention reaction to detect low-level methylation. Genomic or cfDNA is isolated, and optionally treated with a DNA repair kit prior to bisulfite conversion (FIGS. 14 and 15, Step A). The regions of interest are selectively extended using locus-specific downstream primers (with optional identical 8-11 base tails), and a deoxynucleotide mix that does NOT include dUTP. In this embodiment, another layer of selectivity can be incorporated into the method by including a 3′ cleavable blocking group (Blk 3′, e.g. C3 spacer), and an RNA base (r), in the downstream primer. Upon target-specific hybridization, RNase H (star symbol) removes the RNA base to liberate a 3′ OH group which is suitable for polymerase extension (FIG. 14, step B). If the locus-specific downstream primer covers one or more methylation sites, another layer of specificity may be added by using blocking primers whose sequence corresponds to the bisulfite-converted unmethylated sequence. After the extension cycles, add UDG, which destroys the bisulfite converted DNA (but not the primer extension products). Optionally aliquot sample into 12, 24, 36, 48, or 96 wells prior to the initial extension step. Subsequently, the regions of interest are selectively amplified in a limited cycle PCR (8-20 cycles) using locus-specific upstream primers, a blocking LNA or PNA probe comprising bisulfite converted unmethylated sequence (or its complement), and a deoxynucleotide mix that does not include dUTP. In this embodiment, another layer of selectivity can be incorporated into the method by including a 3′ cleavable blocking group (Blk 3′, e.g. C3 spacer), and an RNA base (r), in the upstream primer. Upon target-specific hybridization, RNase H (star symbol) removes the RNA base to liberate a 3′OH group which is a few bases upstream of the bisulfite converted methylated target base, and suitable for polymerase extension (FIG. 14, step C). A blocking LNA or PNA probe comprising the bisulfite converted unmethylated sequence (or its complement) that partially overlaps with the upstream PCR primer will preferentially compete for binding to the bisulfite converted unmethylated sequence over the upstream primer, thus suppressing amplification of bisulfite converted unmethylated sequence DNA during each round of PCR.

[0191] Alternatively, as shown in FIG. 15, the regions of interest are selectively extended using locus-specific upstream primers, a blocking LNA or PNA probe comprising bisulfite converted unmethylated sequence (or its complement), and a deoxynucleotide mix that does not include dUTP. In this embodiment, another layer of selectivity can be incorporated into the method by including a 3′ cleavable blocking group (Blk 3′, e.g. C3 spacer), and an RNA base (r), in the upstream primer. Upon target-specific hybridization, RNase H (star symbol) removes the RNA base to liberate a 3′OH group which is a few bases upstream of the bisulfite converted methylated target base, and suitable for polymerase extension (FIG. 15, step B). A blocking LNA or PNA probe comprising the bisulfite converted unmethylated sequence (or its complement) that partially overlaps with the upstream PCR primer will preferentially compete for binding to the bisulfite converted unmethylated sequence over the upstream primer, thus suppressing amplification of bisulfite converted unmethylated sequence DNA during each round of PCR. Add UDG, which destroys the bisulfite converted DNA (but not the primer extension products). Subsequently, the locus-specific downstream primers are added, followed by limited cycle PCR (8 to 12 cycles, FIG. 15, step C). If the locus-specific downstream primer covers one or more methylation sites, another layer of specificity may be added by using blocking primers whose sequence corresponds to the bisulfite-converted unmethylated sequence. Optionally aliquot sample into 12, 24, 36, 48, or 96 wells prior to the initial extension step.

[0192] For the protocol illustrated in FIGS. 14 and 15, following the limited cycle PCR, the PCR products are aliquoted into separate wells, micro-pores or droplets containing Taqman™ probes, bisulfite converted methylation base-specific primers comprising 5′ primer-specific portions (Ai), bisulfite converted locus-specific primers comprising 5′ primer-specific portions (Ci) and matching primers Ai and Ci. These primers combine to amplify the bisulfite converted methylation-containing sequence, if present in the sample (FIGS. 14 and 15, step D) Blocking LNA or PNA probes comprising the bisulfite converted unmethylated sequence (or its complement) enables amplification of originally methylated but not originally un-methylated allele. Primers are unblocked with RNaseH2 only when bound to correct target. Following PCR, the products can be detected using pairs of matched primers Ai and Ci, and TaqMan™ probes that span the bisulfite-converted methylation target regions as described supra for FIG. 4 (see FIG. 14, steps E-G), or using other suitable means known in the art.

[0193] Alternatively, following the limited cycle PCR, the PCR products are aliquoted into separate wells, micro-pores or droplets containing Taqman™ probes, bisulfite converted methylation base-specific primers comprising 5′ primer-specific portions (Ai), bisulfite converted locus-specific primers comprising 5′ primer-specific portions (Bi-Ci) and matching UniTaq primers F1-Bi-Q-Ai and Ci. Blocking LNA or PNA probes comprising the bisulfite converted unmethylated sequence (or its complement) enables amplification of originally methylated but not originally un-methylated alleles. Primers are unblocked with RNaseH2 only when bound to correct target. Following PCR, the products are amplified using UniTaq-specific primers (i.e., F1-Bi-Q-Ai, Ci) and detected as described supra for FIG. 5, or using other suitable means known in the art.

[0194] FIGS. 16 and 17 illustrate additional exemplary exPCR-LDR-qPCR carryover prevention reactions to detect low-level methylation. Genomic or cfDNA is isolated and then either treated with: (i) methyl-sensitive restriction endonucleases, e.g., Bsh1236I (CG\hat{ }CG), to completely digest unmethylated DNA and prevent carryover, or (ii) capture and enrich for methylated DNA, (iii) followed by a DNA repair kit (FIGS. 16 and 17, step A). The DNA is bisulfite-treated to convert unmethylated residues to uracil thereby rendering the double stranded DNA non-complementary. The regions of interest are selectively extended using locus-specific downstream primers (with optional identical 8-11 base tails), and a deoxynucleotide mix that does NOT include dUTP. In this embodiment, another layer of selectivity can be incorporated into the method by including a 3′ cleavable blocking group (Blk 3′, e.g. C3 spacer), and an RNA base (r), in the downstream primer. Upon target-specific hybridization, RNase H (star symbol) removes the RNA base to liberate a 3′OH group which is suitable for polymerase extension (FIG. 16, step B). If the locus-specific downstream primer covers one or more methylation sites, another layer of specificity may be added by using blocking primers whose sequence corresponds to the bisulfite-converted unmethylated sequence. After the extension cycles, add UDG, which destroys the bisulfite converted DNA (but not the primer extension products). Optionally aliquot sample into 12, 24, 36, 48, or 96 wells prior to the initial extension step. Subsequently, the regions of interest are selectively amplified in a limited cycle PCR (8-20 cycles) using locus-specific upstream primers, and a deoxynucleotide mix that does not include dUTP. In this embodiment, another layer of selectivity can be incorporated into the method by including a 3′ cleavable blocking group (Blk 3′, e.g. C3 spacer), and an RNA base (r), in the upstream primer. Upon target-specific hybridization, RNase H (star symbol) removes the RNA base to liberate a 3′OH group which is a few bases upstream of the bisulfite converted methylated target base, and suitable for polymerase extension (FIG. 16, step C). If the locus-specific upstream primer covers one or more methylation sites, another layer of specificity may be added by using blocking primers whose sequence corresponds to the bisulfite-converted unmethylated sequence.

[0195] Alternatively, as shown in FIG. 17, the regions of interest are selectively extended using locus-specific upstream primers for bisulfite converted DNA, and a deoxynucleotide mix that does not include dUTP. In this embodiment, another layer of selectivity can be incorporated into the method by including a 3′ cleavable blocking group (Blk 3′, e.g. C3 spacer), and an RNA base (r), in the upstream primer. Upon target-specific hybridization, RNase H (star symbol) removes the RNA base to liberate a 3′OH group which is a few bases upstream of the bisulfite converted methylated target base, and suitable for polymerase extension (FIG. 17, step B). If the locus-specific upstream primer covers one or more methylation sites, another layer of specificity may be added by using blocking primers whose sequence corresponds to the bisulfite-converted unmethylated sequence. Add UDG, which destroys the bisulfite converted DNA (but not the primer extension products). Subsequently, the locus-specific downstream primers are added, followed by limited (8 to 20 cycles) or full (20-40 cycles) PCR using a deoxynucleotide mix that includes dUTP (FIG. 17, step C). Optionally, the downstream primers contain identical 8-11 base tails to prevent primer dimers. Optionally aliquot sample into 12, 24, 36, 48, or 96 wells prior to the initial extension step. The amplified products contain dU as shown in FIG. 17, step D, which allows for subsequent treatment with UDG or a similar enzyme for carryover prevention.

[0196] For FIG. 16, methylation-specific upstream and locus-specific downstream probes containing tails (Ai, Ci′) enable formation of a ligation product in the presence of bisulfite converted methylated base-containing PCR products. Following ligation, the ligation products can be detected using pairs of matched primers Ai and Ci, and TaqMan™ probes that span the ligation junction as described supra for FIG. 2 (see FIG. 16, steps E-H), or using other suitable means known in the art.

[0197] Alternatively, methylation-specific upstream and locus-specific downstream probes containing tails (Ai, Bi′-Ci′) enable formation of a ligation product in the presence of bisulfite converted methylated base-containing PCR products. Following ligation, the ligation products are amplified using UniTaq-specific primers (i.e., F1-Bi-Q-Ai, Ci) and detected as described supra for FIG. 3, or using other suitable means known in the art.

[0198] FIGS. 18 and 19 illustrate additional exemplary exPCR-LDR-qPCR carryover prevention reactions to detect low-level methylation. Genomic or cfDNA is isolated, and then either treated with: (i) methyl-sensitive restriction endonucleases, e.g., Bsh1236I (CG\hat{ }CG), to completely digest unmethylated DNA and prevent carryover, or (ii) capture and enrich for methylated DNA, (iii) followed by a DNA repair kit (FIGS. 18 and 19, step A). The DNA is bisulfite-treated to convert unmethylated residues to uracil thereby rendering the double stranded DNA non-complementary. The regions of interest are selectively extended using locus-specific downstream primers (with optional identical 8-11 base tails), and a deoxynucleotide mix that does NOT include dUTP. In this embodiment, another layer of selectivity can be incorporated into the method by including a 3′ cleavable blocking group (Blk 3′, e.g. C3 spacer), and an RNA base (r), in the downstream primer. Upon target-specific hybridization, RNase H (star symbol) removes the RNA base to liberate a 3′OH group which is suitable for polymerase extension (FIG. 18, step B). If the locus-specific downstream primer covers one or more methylation sites, another layer of specificity may be added by using blocking primers whose sequence corresponds to the bisulfite-converted unmethylated sequence. After the extension cycles, add UDG, which destroys the bisulfite converted DNA (but not the primer extension products). Optionally aliquot sample into 12, 24, 36, 48, or 96 wells prior to the initial extension step.

[0199] Alternatively, as shown in FIG. 19, the regions of interest are selectively extended using locus-specific upstream primers for bisulfite converted DNA, and a deoxynucleotide mix that does not include dUTP. Blocking LNA or PNA probes comprising the bisulfite converted unmethylated sequence (or its complement) enables amplification of originally methylated but not originally un-methylated alleles. In this embodiment, another layer of selectivity can be incorporated into the method by including a 3′ cleavable blocking group (Blk 3′, e.g. C3 spacer), and an RNA base (r), in the upstream primer. Upon target-specific hybridization, RNase H (star symbol) removes the RNA base to liberate a 3′OH group which is a few bases upstream of the bisulfite converted methylated target base, and suitable for polymerase extension (FIG. 19, step B). Add UDG, which destroys the bisulfite converted DNA (but not the primer extension products). Optionally aliquot sample into 12, 24, 36, 48, or 96 wells prior to the initial extension step.

[0200] As shown in FIG. 18, step C, bisulfite converted methylation base-specific primers (comprising 5′ primer-specific portions Ai) and bisulfite converted locus-specific primers (comprising 5′ primer-specific portions Ci) are added to then perform limited cycle nested PCR to amplify the bisulfite converted methylation-containing sequence, if present in the sample. Primers are unblocked with RNaseH2 only when bound to correct target. Following PCR, the products can be detected using pairs of matched primers Ai and Ci, and TaqMan™ probes that span the bisulfite-converted methylation target regions as described supra for FIG. 4 (see FIG. 18, steps D-F), or using other suitable means known in the art.

[0201] Alternatively, bisulfite converted methylation base-specific primers (comprising 5′ primer-specific portions Ai) and bisulfite converted locus-specific primers (comprising 5′ primer-specific portions Bi-Ci) are added to then perform limited cycle nested PCR to amplify the bisulfite converted methylation-containing sequence, if present in the sample. Primers are unblocked with RNaseH2 only when bound to correct target. Following PCR, the products are amplified using UniTaq-specific primers (i.e., F1-Bi-Q-Ai, Ci) and detected as described supra for FIG. 5, or using other suitable means known in the art.

[0202] FIG. 20 illustrates another exemplary exPCR-qPCR carryover prevention reaction to detect low-level methylation. Genomic or cfDNA is isolated and then either treated with: (i) methyl-sensitive restriction endonucleases, e.g., Bsh12361 (CG\hat{ }CG), to completely digest unmethylated DNA and prevent carryover, or (ii) capture and enrich for methylated DNA, (iii) followed by a DNA repair kit (FIG. 20, step A). The DNA is bisulfite-treated to convert unmethylated residues to uracil thereby rendering the double stranded DNA non-complementary. The regions of interest are selectively extended using locus-specific downstream primers (with optional identical 8-11 base tails), and a deoxynucleotide mix that does not include dUTP. In this embodiment, another layer of selectivity can be incorporated into the method by including a 3′ cleavable blocking group (Blk 3′, e.g. C3 spacer), and an RNA base (r), in the downstream primer. Upon target-specific hybridization, RNase H (star symbol) removes the RNA base to liberate a 3′OH group which is suitable for polymerase extension (FIG. 20, step B). If the locus-specific downstream primer covers one or more methylation sites, another layer of specificity may be added by using blocking primers whose sequence corresponds to the bisulfite-converted unmethylated sequence. After the extension cycles, add UDG, which destroys the bisulfite converted DNA (but not the primer extension products). Optionally aliquot sample into 12, 24, 36, 48, or 96 wells prior to the initial extension step. Subsequently, the regions of interest are selectively amplified in a limited cycle PCR (8-20 cycles) using locus-specific upstream primers, and a deoxynucleotide mix that does not include dUTP. In this embodiment, another layer of selectivity can be incorporated into the method by including a 3′ cleavable blocking group (Blk 3′, e.g. C3 spacer), and an RNA base (r), in the upstream primer. Upon target-specific hybridization, RNase H (star symbol) removes the RNA base to liberate a 3′OH group which is a few bases upstream of the bisulfite converted methylated target base, and suitable for polymerase extension (FIG. 20, step C). If the locus-specific upstream primer covers one or more methylation sites, another layer of specificity may be added by using blocking primers whose sequence corresponds to the bisulfite-converted unmethylated sequence.

[0203] Following the limited cycle PCR, the PCR products are aliquoted into separate wells, micro-pores or droplets containing Taqman™ probes, bisulfite-converted, methylation base-specific, and bisulfite converted locus-specific primers, to amplify the bisulfite converted methylation-containing sequence, if present in the sample (FIG. 20, step D). The bisulfite converted methylation-containing products are amplified and detected as described supra for FIG. 6 (see FIG. 20, steps D-E), or using other suitable means known in the art.

[0204] FIG. 21 illustrate additional exemplary exPCR-qPCR carryover prevention reaction to detect low-level methylation. Genomic or cfDNA is isolated, and then either treated with: (i) methyl-sensitive restriction endonucleases, e.g., Bsh1236I (CG\hat{ }CG), to completely digest unmethylated DNA and prevent carryover, or (ii) capture and enrich for methylated DNA, (iii) followed by a DNA repair kit (FIG. 21, step A). The DNA is bisulfite-treated to convert unmethylated residues to uracil thereby rendering the double stranded DNA non-complementary. The regions of interest are selectively extended using locus-specific downstream primers (with optional identical 8-11 base tails), and a deoxynucleotide mix that does not include dUTP. In this embodiment, another layer of selectivity can be incorporated into the method by including a 3′ cleavable blocking group (Blk 3′, e.g. C3 spacer), and an RNA base (r), in the downstream primer. Upon target-specific hybridization, RNase H (star symbol) removes the RNA base to liberate a 3′OH group which is suitable for polymerase extension (FIG. 21, step B). If the locus-specific downstream primer covers one or more methylation sites, another layer of specificity may be added by using blocking primers whose sequence corresponds to the bisulfite-converted unmethylated sequence. After the extension cycles, UDG, which destroys the bisulfite converted DNA (but not the primer extension products) is added. Optionally, samples are aliquoted into 12, 24, 36, 48, or 96 wells prior to the initial extension step. Subsequently, the regions of interest are selectively amplified in a limited cycle PCR (8-20 cycles) using locus-specific upstream primers, and a deoxynucleotide mix that does not include dUTP. In this embodiment, another layer of selectivity can be incorporated into the method by including a 3′ cleavable blocking group (Blk 3′, e.g. C3 spacer), and an RNA base (r), in the upstream primer. Upon target-specific hybridization, RNase H (star symbol) removes the RNA base to liberate a 3′OH group which is a few bases upstream of the bisulfite converted methylated target base, and suitable for polymerase extension (FIG. 21, step C). If the locus-specific upstream primer covers one or more methylation sites, another layer of specificity may be added by using blocking primers whose sequence corresponds to the bisulfite-converted unmethylated sequence.

[0205] For the protocol illustrated in FIG. 21, following the limited cycle PCR, the PCR products are aliquoted into separate wells, micro-pores or droplets containing Taqman™ probes, bisulfite converted methylation base-specific primers comprising 5′ primer-specific portions (Ai), bisulfite converted locus-specific primers comprising 5′ primer-specific portions (Ci) and matching primers Ai and Ci. These primers combine to amplify the bisulfite converted methylation-containing sequence, if present in the sample (FIG. 21, step D). Primers are unblocked with RNaseH2 only when bound to correct target. Following PCR, the products can be detected using pairs of matched primers Ai and Ci, and TaqMan™ probes that span the bisulfite-converted methylation target regions as described supra for FIG. 4 (see FIG. 21, steps E-G), or using other suitable means known in the art.

[0206] Alternatively, following the limited cycle PCR, the PCR products are aliquoted into separate wells, micro-pores or droplets containing Taqman™ probes, bisulfite converted methylation base-specific primers comprising 5′ primer-specific portions (Ai), bisulfite converted locus-specific primers comprising 5′ primer-specific portions (Bi-Ci) and matching UniTaq primers F1-Bi-Q-Ai and Ci. Primers are unblocked with RNaseH2 only when bound to correct target. Following PCR, the products are amplified using UniTaq-specific primers (i.e., F1-Bi-Q-Ai, Ci) and detected as described supra for FIG. 5, or using other suitable means known in the art.

[0207] Another aspect of the present application is directed to a method for identifying, in a sample, one or more parent nucleic acid molecules containing a target nucleotide sequence differing from nucleotide sequences in other parent nucleic acid molecules in the sample by one or more methylated residues. The method involves providing a sample containing one or more parent nucleic acid molecules potentially containing the target nucleotide sequence differing from the nucleotide sequences in other parent nucleic acid molecules by one or more methylated residues, and subjecting the nucleic acid molecules in the sample to a bisulfite treatment under conditions suitable to convert unmethylated cytosine residues to uracil residues. One or more enzymes capable of digesting deoxyuracil (dU)-containing nucleic acid molecules present in the sample are provided. One or more primary oligonucleotide primer sets are also provided. Each primary oligonucleotide primer set comprises (a) a first primary oligonucleotide primer having a 5′ primer-specific portion and a 3′ portion that comprises a nucleotide sequence that is complementary to a sequence in the bisulfite-treated parent nucleic acid molecules adjacent to the bisulfite-treated target nucleotide sequence containing the one or more methylated residue and (b) a second primary oligonucleotide primer having a 5′ primer-specific portion and a 3′ portion that comprises a nucleotide sequence that is complementary to a portion of an extension product formed from the first primary oligonucleotide primer. The bisulfite treated sample, the one or more first primary oligonucleotide primers of the one or more primary oligonucleotide primer sets, a deoxynucleotide mix, and a DNA polymerase are blended to form one or more polymerase extension reaction mixtures. The one or more polymerase extension reaction mixtures are subjected to conditions suitable for one or more polymerase extension reaction cycles comprising a denaturation treatment, a hybridization treatment, and an extension treatment, thereby forming primary extension products comprising the complement of the bisulfite treated target nucleotide sequence. The one or more polymerase extension reaction mixtures comprising the primary extension products, the one or more secondary primary oligonucleotide primers of the one or more primary oligonucleotide primer sets, the one or more enzymes capable of digesting deoxyuracil (dU)-containing nucleic acid molecules in the reaction mixture, a deoxynucleotide mix, and a DNA polymerase are blended to form one or more first polymerase chain reaction mixtures. The method further comprises subjecting the one or more first polymerase chain reaction mixtures to conditions suitable for digesting deoxyuracil (dU)-containing nucleic acid molecules present in the polymerase chain reaction mixtures and for carrying out one or more polymerase chain reaction cycles comprising a denaturation treatment, a hybridization treatment, and an extension treatment, thereby forming first polymerase chain reactions products comprising the bisulfite-treated target nucleotide sequence or a complement thereof. One or more secondary oligonucleotide primer sets are provided. Each secondary oligonucleotide primer set comprises (a) a first secondary oligonucleotide primer comprising the same nucleotide sequence as the 5′ primer-specific portion of the first polymerase chain reaction products or their complements and (b) a second secondary oligonucleotide primer comprising a nucleotide sequence that is complementary to the 3′ primer-specific portion of the first polymerase chain reaction products or their complements. The primary polymerase chain reaction product sequences, the one or more secondary oligonucleotide primer sets, the one or more enzymes capable of digesting deoxyuracil (dU)-containing nucleic acid molecules, a deoxynucleotide mix including dUTP, and a DNA polymerase are blended to form one or more second polymerase chain reaction mixtures. The one or more second polymerase chain reaction mixtures are subjected to conditions suitable for digesting deoxyuracil (dU)-containing nucleic acid molecules present in the second polymerase chain reaction mixtures and for carrying out one or more polymerase chain reaction cycles comprising a denaturation treatment, a hybridization treatment, and an extension treatment thereby forming second polymerase chain reaction products. The method further involves detecting and distinguishing the second polymerase chain reactions products in the one or more second polymerase chain reaction mixtures to identify the presence of one or more parent nucleic acid molecules containing target nucleotide sequences differing from nucleotide sequences in other parent nucleic acid molecules in the sample by one or more methylated residues.

[0208] FIG. 22 illustrates an embodiment of this aspect of the present application.

[0209] FIG. 22 illustrates an additional exemplary exPCR-qPCR carryover prevention reaction to detect low-level methylation. Genomic or cfDNA is isolated, and then either treated with: (i) methyl-sensitive restriction endonucleases, e.g., Bsh12361 (CG\hat{ }CG), to completely digest unmethylated DNA and prevent carryover, or (ii) capture and enrich for methylated DNA, (iii) followed by a DNA repair kit (FIG. 22, step A). The DNA is bisulfite-treated to convert unmethylated residues to uracil thereby rendering the double stranded DNA non-complementary. The regions of interest are selectively extended using bisulfite converted locus-specific downstream primers comprising 5′ primer-specific portions (Ci for FIG. 22), and a deoxynucleotide mix that does not include dUTP. In this embodiment, another layer of selectivity can be incorporated into the method by including a 3′ cleavable blocking group (Blk 3′, e.g. C3 spacer), and an RNA base (r), in the downstream primer. Upon target-specific hybridization, RNase H (star symbol) removes the RNA base to liberate a 3′OH group which is suitable for polymerase extension (FIG. 22, step B). In this embodiment, the locus-specific downstream primer covers one or more methylation sites, and another layer of specificity may be added by using blocking primers whose sequence corresponds to the bisulfite-converted unmethylated sequence. After the extension cycles, add UDG, which destroys the bisulfite converted DNA (but not the primer extension products). Optionally aliquot sample into 12, 24, 36, 48, or 96 wells prior to the initial extension step. Subsequently, the regions of interest are selectively amplified in a limited cycle PCR (8-20 cycles) using bisulfite converted methylation base-specific upstream primers comprising 5′ primer-specific portions (Ai), and a deoxynucleotide mix that does not include dUTP. In this embodiment, another layer of selectivity can be incorporated into the method by including a 3′ cleavable blocking group (Blk 3′, e.g. C3 spacer), and an RNA base (r), in the upstream primer. Upon target-specific hybridization, RNase H (star symbol) removes the RNA base to liberate a 3′OH group which is a few bases upstream of the bisulfite converted methylated target base, and suitable for polymerase extension (FIG. 22, step C). Since the methylation base-specific upstream primer covers one or more methylation sites, another layer of specificity may be added by using blocking primers whose sequence corresponds to the bisulfite-converted unmethylated sequence.

[0210] As shown in FIG. 22 step D, the limited cycle PCR products comprise of Ai tag sequence, methylation-specific sequence, and Ci′ tag sequence, and are distributed into wells, micro-pores, or droplets for Taqman™ reactions. Following PCR, the products can be detected using pairs of matched primers Ai and Ci, and TaqMan™ probes that span the bisulfite-converted methylation target regions as described supra for FIG. 4 (see FIG. 22, steps D-F), or using other suitable means known in the art.

[0211] Alternatively, the limited cycle PCR products comprise of Ai tag sequence, methylation-specific sequence, and Bi′-Ci′ tag sequence, and are distributed into wells, micro-pores, or droplets for Taqman™ reactions. Following PCR, the products are amplified using UniTaq-specific primers (i.e., F1-Bi-Q-Ai, Ci) and detected as described supra for FIG. 5, or using other suitable means known in the art.

[0212] In one embodiment, the method further comprises contacting the sample with DNA repair enzymes to repair damaged DNA, abasic sites, oxidized bases, or nicks in the DNA.

[0213] In another embodiment, the method further comprises contacting the sample with at least a first methylation sensitive enzyme to form a restriction enzyme reaction mixture prior to, or concurrent with, said blending to form one or more polymerase extension reaction mixtures, wherein said first methylation sensitive enzyme cleaves nucleic acid molecules in the sample that contain one or more unmethylated residues within at least one methylation sensitive enzyme recognition sequence, and whereby said detecting involves detection of one or more parent nucleic acid molecules containing the target nucleotide sequence, wherein said parent nucleic acid molecules originally contained one or more methylated residues.

[0214] In accordance with this and all aspects of the present invention, a “methylation sensitive enzyme” is an endonuclease that will not cleave or has reduced cleavage efficiency of its cognate recognition sequence in a nucleic acid molecule when the recognition sequence contains a methylated residue (i.e., it is sensitive to the presence of a methylated residue within its recognition sequence). A “methylation sensitive enzyme recognition sequence” is the cognate recognition sequence for a methylation sensitive enzyme. In some embodiments, the methylated residue is a 5-methyl-C, within the sequence CpG (i.e., 5-methyl-CpG). A non-limiting list of methylation sensitive restriction endonuclease enzymes that are suitable for use in the methods of the present invention include, without limitation, AciI, HinP1I, Hpy99I, HpyCH4IV, BstUI, HpaII, HhaI, or any combination thereof.

[0215] In a further embodiment, the method further comprises contacting the sample with an immobilized methylated nucleic acid binding protein or antibody to selectively bind and enrich for methylated nucleic acid in the sample.

[0216] In one embodiment, the primers from the one or more primary or secondary oligonucleotide primer sets comprise a portion that has no or one nucleotide sequence mismatch when hybridized in a base-specific manner to the target nucleic acid sequence or bisulfite-converted methylated nucleic acid sequence or complement sequence thereof, but have one or more additional nucleotide sequence mismatches that interferes with polymerase extension when primers from said one or more primary or secondary oligonucleotide primer sets hybridize in a base-specific manner to a corresponding nucleotide sequence portion in wildtype nucleic acid sequence or bisulfate-converted unmethylated nucleic acid sequence or complement sequence thereof.

[0217] One or both primary oligonucleotide primers of the primary oligonucleotide primer set and/or one or both secondary oligonucleotide primers of the secondary oligonucleotide primer set may have a 3′ portion comprising a cleavable nucleotide or nucleotide analogue and a blocking group, such that the 3′ end of said primer or primers is unsuitable for polymerase extension. This embodiment of the method further comprises cleaving the cleavable nucleotide or nucleotide analog of one or both oligonucleotide primers during said hybridization treatment, thereby liberating free 3′OH ends on one or both oligonucleotide primers prior to said extension treatment. In one embodiment, the cleavable nucleotide comprises one or more RNA bases.

[0218] In another embodiment, primers from the one or more primary or secondary oligonucleotide primer sets comprise a sequence that differs from the target nucleic acid sequence or bisulfite-converted methylated nucleic acid sequence or complement sequence thereof, said difference is located two or three nucleotide bases from the liberated free 3′OH end.

[0219] In another embodiment, the method further comprises providing one or more blocking oligonucleotide primers comprising one or more mismatched bases at the 3′ end or one or more nucleotide analogs and a blocking group at the 3′ end, such that the 3′ end of said blocking oligonucleotide primer is unsuitable for polymerase extension when hybridized in a base-specific manner to wildtype nucleic acid sequence or bisulfite-converted unmethylated nucleic acid sequence or complement sequence thereof, wherein said blocking oligonucleotide primer comprises a portion having a nucleotide sequence that is the same as a nucleotide sequence portion in the wildtype nucleic acid sequence or bisulfite-converted unmethylated nucleic acid sequence or complement sequence thereof to which the blocking oligonucleotide primer hybridizes but has one or more nucleotide sequence mismatches to a corresponding nucleotide sequence portion in the target nucleic acid sequence or bisulfate-converted methylated nucleic acid sequence or complement sequence thereof. The one or more blocking oligonucleotide primers are blended with the sample or subsequent products prior to a polymerase extension reaction, polymerase chain reaction, or ligation reaction, whereby during hybridization the one or more blocking oligonucleotide primers preferentially hybridize in a base-specific manner to a wildtype nucleic acid sequence or bisulfite-converted unmethylated nucleic acid sequence or complement sequence thereof, thereby interfering with polymerase extension or ligation during reaction of a primer or probes hybridized in a base-specific manner to the wildtype sequence or bisulfite-converted unmethylated sequence or complement sequence thereof.

[0220] In certain embodiments, the first secondary oligonucleotide primer has a 5′ primer-specific portion and the second secondary oligonucleotide primer has a 5′ primer-specific portion, said one or more secondary oligonucleotide primer sets further comprising a third secondary oligonucleotide primer comprising the same nucleotide sequence as the 5′ primer-specific portion of the first secondary oligonucleotide primer and (d) a fourth secondary oligonucleotide primer comprising the same nucleotide sequence as the 5′ primer-specific portion of the second secondary oligonucleotide primer.

[0221] Another aspect of the present application is directed to a method for identifying in a sample, one or more parent ribonucleic acid molecules containing a target ribonucleic acid sequence differing from ribonucleic acid sequences of other parent ribonucleic acid molecules in the sample due to alternative splicing, alternative transcript, alternative start site, alternative coding sequence, alternative non-coding sequence, exon insertion, exon deletion, intron insertion, translocation, mutation, or other rearrangement at the genome level. The method involves providing a sample containing one or more parent ribonucleic acid molecules containing a target ribonucleic acid molecule potentially differing in sequence from other parent ribonucleic acid molecules and providing one or more enzymes capable of digesting deoxyuracil (dU) containing nucleic acid molecules present in the sample. The sample is contacted with one or more enzymes capable of digesting dU containing nucleic acid molecules potentially present in the sample. One or more primary oligonucleotide primer sets are then provided. Each primary oligonucleotide primer set comprises (a) a first primary oligonucleotide primer that comprises a nucleotide sequence that is complementary to the RNA sequence in the parent ribonucleic acid molecule adjacent to the target ribonucleotide sequence and (b) a second primary oligonucleotide primer that comprises a nucleotide sequence that is complementary to a portion of the cDNA extension product formed from the first primary oligonucleotide primer. The contacted sample, the one or more primary oligonucleotide primer sets, a deoxynucleotide mix including dUTP, a reverse transcriptase, and a DNA polymerase or a DNA polymerase with reverse-transcriptase activity are blended to form one or more reverse-transcription/polymerase chain reaction mixtures. The one or more reverse-transcription/polymerase chain reaction mixtures are subjected to conditions suitable for generating complementary deoxyribonucleic acid (cDNA) molecules to the target ribonucleic nucleic acid and to carry out one or more polymerase chain reaction cycles comprising a denaturation treatment, a hybridization treatment, and an extension treatment thereby forming one or more different reverse transcription/polymerase products. The method further comprises providing one or more oligonucleotide probe sets. Each probe set comprises (a) a first oligonucleotide probe having a 5′ primer-specific portion and a 3′ target sequence-specific portion, and (b) a second oligonucleotide probe having a 5′ target sequence-specific portion and a 3′ primer-specific portion, wherein the first and second oligonucleotide probes of a probe set are configured to hybridize, in a base specific manner, on complementary portions of a reverse transcriptase/polymerase product corresponding to the target ribonucleic acid molecule sequence. The reverse transcriptase/polymerase products are contacted with a ligase and the one or more oligonucleotide probe sets to form one or more ligation reaction mixtures, and the one or more ligation reaction mixtures are subjected to one or more ligation reaction cycles whereby the first and second probes of the one or more oligonucleotide probe sets, when hybridized to their complement, are ligated together to form ligated product sequences in the ligase reaction mixture, wherein each ligated product sequence comprises the 5′ primer-specific portion, the target-specific portions, and the 3′ primer-specific portion. The method further involves providing one or more secondary oligonucleotide primer sets. Each secondary oligonucleotide primer set comprises (a) a first secondary oligonucleotide primer comprising the same nucleotide sequence as the 5′ primer-specific portion of the ligated product sequence and (b) a second secondary oligonucleotide primer comprising a nucleotide sequence that is complementary to the 3′ primer-specific portion of the ligated product sequence. The ligated product sequences, the one or more secondary oligonucleotide primer sets with one or more enzymes capable of digesting deoxyuracil (dU)-containing nucleic acid molecules, a deoxynucleotide mix including dUTP, and a DNA polymerase are blended to form one or more first polymerase chain reaction mixtures, and the one or more first polymerase chain reaction mixtures are subjected to conditions suitable for digesting deoxyuracil (dU)-containing nucleic acid molecules present in the first polymerase chain reaction mixtures and for carrying out one or more polymerase chain reaction cycles comprising a denaturation treatment, a hybridization treatment, and an extension treatment thereby forming first polymerase chain reaction products. The method further comprises detecting and distinguishing the first polymerase chain reaction products, thereby identifying the presence of one or more parent ribonucleic acid molecules containing a target ribonucleic acid sequence differing from ribonucleic acid sequences of other parent ribonucleic acid molecules in the sample due to alternative splicing, alternative transcript, alternative start site, alternative coding sequence, alternative non-coding sequence, exon insertion, exon deletion, intron insertion, translocation, mutation, or other rearrangement at the genome level.

[0222] FIGS. 23 and 26 illustrate embodiments of this aspect of the present application.

[0223] FIG. 23 illustrates an exemplary RT-PCR-LDR-qPCR carryover prevention reaction to detect translocations at the mRNA level. Such fusion mRNA may be isolated from circulating tumor cells, exosomes or from other plasma fractions. For accurate enumeration, aliquot into 12, 24, 36, or 48 wells prior to PCR. For higher copy number, distribute equally in 13 wells, dilute last well equally into 13 additional wells, and repeat for remaining wells. In this embodiment, mRNA is isolated (FIG. 23, step A), and treated with UDG for carryover prevention (FIG. 23, step B). cDNA is generated using 3′ transcript-specific primers and reverse-transcriptase in the presence of dUTP. Suitable reverse transcriptases include but are not limited to Moloney Murine Leukemia Virus Reverse Transcriptase (M-MLV RT, New England Biolabs), or Superscript II or III Reverse Transcriptase (Life Technologies). Taq polymerase is activated to perform limited cycle PCR amplification (12-20) to maintain relative ratios of different amplicons (FIG. 23, step B). The primers contain identical 8-11 base tails to prevent primer dimers. PCR products incorporate dUTP, allowing for carryover prevention (FIG. 23, step C).

[0224] As shown in FIG. 23, step D, exon junction-specific ligation oligonucleotide probes containing primer-specific portions (Ai, Ci′) suitable for subsequent PCR amplification, hybridize to their corresponding target sequence in a base-specific manner. Ligase covalently seals the two oligonucleotides together (FIG. 23, step D), and ligation products are aliquoted into separate wells for detection using tag-primers (Ai, Ci) and TaqMan™ probe (F1-Q) which spans the ligation junction (FIG. 23, step E). Treat samples with UDG for carryover prevention, which also destroys original target amplicons (FIG. 23, step E). Only authentic LDR products will amplify, when using PCR in the presence of dUTP. Copy number of fusion transcripts is determined based on signal from wells where original distribution was one copy/well. Neither original PCR primers nor LDR probes amplify LDR products, providing additional carryover protection.

[0225] Another aspect of the present application is directed to a method for identifying in a sample, one or more parent ribonucleic acid molecules containing a target ribonucleic acid sequence differing from ribonucleic acid sequences of other parent ribonucleic acid molecules in the sample due to alternative splicing, alternative transcript, alternative start site, alternative coding sequence, alternative non-coding sequence, exon insertion, exon deletion, intron insertion, translocation, mutation, or other rearrangement at the genome level. The method involves providing a sample containing one or more parent ribonucleic acid molecules containing a target ribonucleic acid molecule potentially differing in sequence from other parent ribonucleic acid molecules and providing one or more enzymes capable of digesting deoxyuracil (dU)-containing nucleic acid molecules present in the sample. The sample is contacted with one or more enzymes capable of digesting dU containing nucleic acid molecules potentially present in the sample. The method further involves providing one or more primary oligonucleotide primer sets, each primary oligonucleotide primer set comprising (a) a first primary oligonucleotide primer that comprises a nucleotide sequence that is complementary to the RNA sequence in the parent ribonucleic acid molecule adjacent to the target nucleotide sequence and (b) a second primary oligonucleotide primer that comprises a nucleotide sequence that is complementary to a portion of the cDNA extension product formed from the first primary oligonucleotide primer. The contacted sample, the one or more primary oligonucleotide primer sets, a deoxynucleotide mix, a reverse transcriptase and a DNA polymerase or a DNA polymerase with reverse-transcriptase activity are blended to form one or more reverse-transcription/polymerase chain reaction mixtures, and the one or more reverse-transcription/polymerase chain reaction mixtures are subjected to conditions suitable for generating complementary deoxyribonucleic acid (cDNA) molecules to the target RNA and to carry out one or more polymerase chain reaction cycles comprising a denaturation treatment, a hybridization treatment, and an extension treatment thereby forming one or more different reverse-transcription/primary polymerase chain reaction products. The method further comprises providing one or more secondary oligonucleotide primer sets. Each secondary oligonucleotide primer set comprises (a) a first secondary oligonucleotide primer having a 3′ portion that is complementary to a portion of a reverse-transcription/primary polymerase chain reaction product formed from the first primary oligonucleotide primer and (b) a second secondary oligonucleotide primer having a 3′ portion that comprises a nucleotide sequence that is complementary to a portion of a reverse-transcription/primary polymerase chain reaction product formed from the first secondary oligonucleotide primer. The reverse-transcription/primary polymerase chain reaction products, the one or more secondary oligonucleotide primer sets, the one or more enzymes capable of digesting deoxyuracil (dU) containing nucleic acid molecules, a deoxynucleotide mix including dUTP, and a DNA polymerase are blended to form one or more first polymerase chain reaction mixtures, and the one or more first polymerase chain reaction mixtures are subjected to conditions suitable for digesting deoxyuracil (dU)-containing nucleic acid molecules present in the first polymerase chain reaction mixtures and for carrying out two or more polymerase chain reaction cycles comprising a denaturation treatment, a hybridization treatment, and an extension treatment thereby forming first polymerase chain reaction products. The method further involves detecting and distinguishing the first polymerase chain reaction products, thereby identifying the presence of one or more parent ribonucleic acid molecules containing a target ribonucleic acid sequences differing from ribonucleic acid sequences of other parent ribonucleic acid molecules in the sample due to alternative splicing, alternative transcript, alternative start site, alternative coding sequence, alternative non-coding sequence, exon insertion, exon deletion, intron insertion, translocation, mutation, or other rearrangement at the genome level.

[0226] FIGS. 24, 25, 27, and 28 illustrate various embodiments of this aspect of the present application.

[0227] FIGS. 24 and 25 illustrate additional exemplary RT-PCR-LDR-qPCR carryover prevention reaction to detect translocations at the mRNA level. For accurate enumeration, aliquot into 12, 24, 36, or 48 wells prior to PCR. For higher copy number, distribute equally in 13 wells, dilute last well equally into 13 additional wells, and repeat for remaining wells. In this embodiment, mRNA is isolated (FIGS. 24 and 25, step A), and treated with UDG for carryover prevention (FIGS. 24 and 25, step B). cDNA is generated using 3′ transcript-specific primers and reverse-transcriptase. Taq polymerase is activated to perform limited cycle PCR amplification (8-20) to maintain relative ratios of different amplicons (FIGS. 24 and 25, step B). The primers contain identical 8-11 base tails to prevent primer dimers and are added only to wells with the anticipated low-copy dilution.

[0228] For the protocol illustrated in FIG. 24, following the limited cycle PCR, the PCR products are aliquoted into separate wells, micro-pores or droplets containing Taqman™ probes across the cDNA fusion junction, cDNA-specific primers, to amplify the junction sequence, if present in the sample (FIG. 24, step C). The fusion cDNA products are amplified and detected as described supra for FIG. 6 (see FIG. 24, steps C-D), or using other suitable means known in the art.

[0229] For the protocol illustrated in FIG. 25, following the limited cycle PCR, the PCR products are aliquoted into separate wells, micro-pores or droplets containing Taqman™ probes across the cDNA fusion junction, cDNA-specific (forward) primers comprising 5′ primer-specific portions (Ai), cDNA-specific (reverse) primers comprising 5′ primer-specific portions (Ci) and matching primers Ai and Ci. These primers combine to amplify the fusion cDNA sequence, if present in the sample (FIG. 25, step C). Primers are unblocked with RNaseH2 only when bound to correct target. Following PCR, the products can be detected using pairs of matched primers Ai and Ci, and TaqMan™ probes that span the fusion cDNA regions as described supra for FIG. 4 (see FIG. 25, steps D-F), or using other suitable means known in the art.

[0230] FIG. 26 illustrates an exemplary RT-PCR-LDR-qPCR carryover prevention reaction to enumerate mRNA, ncRNA, or lncRNA copy number. RNA is isolated from whole blood cells, exosomes, CTCs or other plasma fractions. For accurate enumeration, aliquot into 12, 24, 36, or 48 wells prior to PCR. For higher copy number, distribute equally in 13 wells, dilute last well equally into 13 additional wells, and repeat for remaining wells. In this embodiment, mRNA is isolated (FIG. 26, step A), and treated with UDG for carryover prevention (FIG. 26, step B). cDNA is generated using 3′ transcript-specific primers and reverse-transcriptase in the presence of dUTP. Taq polymerase is activated to perform limited cycle PCR amplification (12-20) to maintain relative ratios of different amplicons (FIG. 26, step B). The primers contain identical 8-11 base tails to prevent primer dimers. PCR products incorporate dUTP, allowing for carryover prevention (FIG. 26, step C).

[0231] As shown in FIG. 26, step D, exon junction-specific ligation oligonucleotide probes containing primer-specific portions (Ai, Ci′) suitable for subsequent PCR amplification, hybridize to their corresponding target sequence in a base-specific manner. Ligase covalently seals the two oligonucleotides together (FIG. 26, step D), and ligation products are aliquoted into separate wells for detection using tag-primers (Ai, Ci) and TaqMan™ probe (F1-Q) which spans the ligation junction (FIG. 26, step E). Treat samples with UDG for carryover prevention, which also destroys original target amplicons (FIG. 26, step E). Only authentic LDR products will amplify, when using PCR in presence of dUTP. Determine copy number of mRNA, ncRNA, or lncRNA transcripts based on signal from wells where original distribution was one copy/well. Neither original PCR primers nor LDR probes amplify LDR products, providing additional carryover protection.

[0232] FIG. 27 illustrates an exemplary RT-PCR-LDR-qPCR carryover prevention reaction to enumerate mRNA, ncRNA, or lncRNA copy number. Isolate RNA from whole blood cells, exosomes, CTCs or other plasma fractions. For accurate enumeration, aliquot into 12, 24, 36, or 48 wells prior to PCR. For higher copy number, distribute equally in 13 wells, dilute last well equally into 13 additional wells, and repeat for remaining wells. In this embodiment, mRNA is isolated (FIG. 27, step A), and treated with UDG for carryover prevention (FIG. 27, step B). cDNA is generated using 3′ transcript-specific primers and reverse-transcriptase in the presence of dUTP. Taq polymerase is activated to perform limited cycle PCR amplification (8-20) to maintain relative ratios of different amplicons (FIG. 27, step B). The primers contain identical 8-11 base tails to prevent primer dimers. PCR products incorporate dUTP, allowing for carryover prevention (FIG. 27, step C).

[0233] For the protocol illustrated in FIG. 27, following the limited cycle PCR, the PCR products are aliquoted into separate wells, micro-pores or droplets containing Taqman™ probes across the cDNA target region, cDNA-specific primers, to amplify the target sequence, if present in the sample (FIG. 27, step C). The cDNA target products are amplified and detected as described supra for FIG. 6 (see FIG. 27, steps C-D), or using other suitable means known in the art.

[0234] For the protocol illustrated in FIG. 28, following the limited cycle PCR, the PCR products are aliquoted into separate wells, micro-pores or droplets containing Taqman™ probes across the cDNA target region, cDNA-specific (forward) primers comprising 5′ primer-specific portions (Ai), cDNA-specific (reverse) primers comprising 5′ primer-specific portions (Ci) and matching primers Ai and Ci. These primers combine to amplify the target cDNA sequence, if present in the sample (FIG. 28, step C). Primers are unblocked with RNaseH2 only when bound to correct target. Following PCR, the products can be detected using pairs of matched primers Ai and Ci, and TaqMan™ probes that span the target cDNA regions as described supra for FIG. 4 (see FIG. 28, steps D-F), or using other suitable means known in the art.

[0235] Alternatively, following the limited cycle PCR, the PCR products are aliquoted into separate wells, micro-pores or droplets containing Taqman™ probes across the cDNA target region, cDNA-specific (forward) primers comprising 5′ primer-specific portions (Ai), cDNA-specific (reverse) primers comprising 5′ primer-specific portions (Bi-Ci) and matching primers F1-Bi-Q-Ai and Ci (Figure not shown). These primers combine to amplify the target cDNA sequence, if present in the sample. Primers are unblocked with RNaseH2 only when bound to correct target. Following PCR, the products can be detected using pairs of matched primers F1-Bi-Q-Ai and Ci, and TaqMan™ probes that span the target cDNA regions as described supra for FIG. 4, or using other suitable means known in the art.

[0236] Another aspect of the present application is directed to a method for identifying, in a sample, one or more target micro-ribonucleic acid (miRNA) molecules differing in sequence from other miRNA molecules in the sample by one or more bases. The method involves providing a sample containing one or more target miRNA molecules potentially differing in sequence from other miRNA molecules in the sample by one or more bases and providing one or more enzymes capable of digesting deoxyuracil (dU)-containing nucleic acid molecules present in the sample. The sample is contacted with one or more enzymes capable of digesting dU-containing nucleic acid molecules potentially present in the sample, and the contacted sample is blended with a ligase and one or more first oligonucleotide preliminary probes comprising a 5′ phosphate, a 5′ stem-loop portion, an internal primer-specific portion within the loop region, a blocking group, and a 3′ nucleotide sequence that is complementary to a 3′ portion of the target miRNA molecule sequence to form one or more first ligation reaction mixtures. The method further comprises ligating, in the one or more first ligation reaction mixtures, the one or more target miRNA molecules at their 3′ end to the 5′ phosphate of the one or more first oligonucleotide preliminary probes to generate chimeric nucleic acid molecules comprising the target miRNA molecule sequence, if present in the sample, appended to the one or more first oligonucleotide preliminary probes. One or more primary oligonucleotide primer sets are then provided. Each primer set comprises (a) a first primary oligonucleotide primer comprising a nucleotide sequence that is complementary to the internal primer-specific portion of the first oligonucleotide preliminary probe, and (b) a second primary oligonucleotide primer comprising a 5′ primer-specific portion and a 3′ portion, wherein the second primary oligonucleotide primer may be the same or may differ from other second primary oligonucleotide primers in other sets. The one or more first ligation reaction mixtures comprising chimeric nucleic acid molecules, the one or more primary oligonucleotide primer sets, the one or more enzymes capable of digesting deoxyuracil (dU)-containing nucleic acid molecules in the sample, a deoxynucleotide mix including dUTP, and a reverse transcriptase and a DNA polymerase or a DNA polymerase with reverse-transcriptase activity are blended to form one or more reverse-transcription/polymerase chain reaction mixtures. The one or more reverse-transcription/polymerase chain reaction mixtures are subjected to conditions suitable for digesting deoxyuracil (dU)-containing nucleic acid molecules present in the reverse-transcription/polymerase chain reaction mixtures to conditions suitable for generating complementary deoxyribonucleic acid (cDNA) molecules to the chimeric nucleic acid molecules, and to one or more polymerase chain reaction cycles comprising a denaturation treatment, a hybridization treatment, and an extension treatment thereby forming one or more different primary reverse-transcription/polymerase chain reaction products comprising the 5′ primer-specific portion, a nucleotide sequence corresponding to the target miRNA molecule sequence, and the complement of the internal primer-specific portion, and complements thereof. The method further involves providing one or more oligonucleotide probe sets. Each probe set comprises (a) a first oligonucleotide probe having a 5′ primer-specific portion and a 3′ target sequence-specific portion, and (b) a second oligonucleotide probe having a 5′ target sequence-specific portion, a portion complementary to a primary extension product, and a 3′ primer-specific portion, wherein the first and second oligonucleotide probes of a probe set are configured to hybridize, in a base specific manner, on complementary portions of a primary reverse-transcription/polymerase chain reaction product corresponding to the target miRNA molecule sequence, or complement thereof. The primary reverse-transcription/polymerase chain reaction products are contacted with a ligase and the one or more oligonucleotide probe sets to form one or more second ligation reaction mixtures, and the one or more second ligation reaction mixtures are subjected to one or more ligation reaction cycles whereby the first and second oligonucleotide probes of the one or more oligonucleotide probe sets, when hybridized to their complement, are ligated together to form ligated product sequences in the ligation reaction mixture, wherein each ligated product sequence comprises the 5′ primer-specific portion, the target-specific portions, and the 3′ primer-specific portion. The method further involves providing one or more secondary oligonucleotide primer sets. Each secondary oligonucleotide primer set comprises (a) a first secondary oligonucleotide primer comprising the same nucleotide sequence as the 5′ primer-specific portion of the ligated product sequence and (b) a second secondary oligonucleotide primer comprising a nucleotide sequence that is complementary to the 3′ primer-specific portion of the ligated product sequence. The ligated product sequences and the one or more secondary oligonucleotide primer sets are blended with one or more enzymes capable of digesting deoxyuracil (dU)-containing nucleic acid molecules, a deoxynucleotide mix including dUTP, and a DNA polymerase to form one or more second polymerase chain reaction mixtures. The one or more second polymerase chain reaction mixtures are subjected to conditions suitable for digesting deoxyuracil (dU)-containing nucleic acid molecules present in the second polymerase chain reaction mixtures and for carrying out one or more polymerase chain reaction cycles comprising a denaturation treatment, a hybridization treatment, and an extension treatment thereby forming secondary polymerase chain reaction products. The method further comprises detecting and distinguishing the secondary polymerase chain reaction products in the one or more reactions thereby identifying one or more target miRNA molecules differing in sequence from other miRNA molecules in the sample by one or more bases.

[0237] FIG. 29 illustrates an embodiment of this aspect of the present application.

[0238] FIG. 29 illustrates an exemplary Ligation-RT-PCR-LDR-qPCR carryover prevention reaction to quantify miRNA. For accurate enumeration, aliquot into 12, 24, 36, or 48 wells prior to PCR. For higher copy number, distribute equally in 13 wells, dilute last well equally into 13 additional wells, and repeat for remaining wells. This method involves isolating miRNA from exosomes and treating with UDG for carryover prevention (FIG. 29, step B). An oligonucleotide probe having a portion that is complementary to the 3′ end of the target miRNA, and containing a stem-loop, tag (Di′), and blocking group (filled circle) is ligated at its 5′ end to the 3′ end of the target miRNA. The ligation product comprises the miRNA, Di′ tag, the blocking group, and a sequence complementary to the 3′ portion of the miRNA (FIG. 29, step B). A reverse transcriptase such as Moloney Murine Leukemia Virus Reverse Transcriptase (M-MLV RT, New England Biolabs), or Superscript II or III Reverse Transcriptase (Life Technologies) extends primer (Di) to make a full-length copy of the target, and appends three C bases to the 3′ end of extended target sequence (FIG. 29, step B). Tag oligonucleotide (Ei) having the 3′ rGrG+G (+G is the symbol for LNA) hybridizes to the three C bases of the extended target sequence as shown in FIG. 29, step B. The reverse transcriptase undergoes strand switching and copies the Ei tag sequence. Activate Taq polymerase and perform limited cycle PCR amplification (12-20), using dUTP, using tag primers (Di, Ei), to maintain relative ratios of different amplicons. The PCR products incorporate dU, allowing for carryover prevention (FIG. 29, step C).

[0239] As shown in FIG. 29, step D miRNA sequence-specific ligation probes containing primer-specific portions (Ai, Ci′) suitable for subsequent PCR amplification, hybridize to their corresponding target sequence in a base-specific manner. Following ligation, the ligation products can be detected using pairs of matched primers Ai and Ci, and TaqMan™ probes that span the ligation junction as described supra for FIG. 2 (see FIG. 29, steps D-F), or using other suitable means known in the art.

[0240] Another aspect of the present application is directed to a method for identifying, in a sample, one or more target micro-ribonucleic acid (miRNA) molecules differing in sequence from other miRNA molecules in the sample by one or more bases. The method involves providing a sample containing one or more target miRNA molecules potentially differing in sequence from other miRNA molecules in the sample by one or more bases and providing one or more enzymes capable of digesting deoxyuracil (dU)-containing nucleic acid molecules present in the sample. The sample is contacted with one or more enzymes capable of digesting dU-containing nucleic acid molecules potentially present in the sample, and the contacted sample is blended with a ligase and one or more first oligonucleotide probes comprising a 5′ phosphate, a 5′ stem-loop portion, an internal primer-specific portion within the loop region, a blocking group, and a 3′ nucleotide sequence that is complementary to a 3′ portion of the target miRNA molecule sequence to form one or more ligation reaction mixtures. The method further involves ligating, in the one or more ligation reaction mixtures, the one or more target miRNA molecules at their 3′ end to the 5′ phosphate of the one or more first oligonucleotide probes to generate chimeric nucleic acid molecules comprising the target miRNA molecule sequence, if present in the sample, appended to the one or more first oligonucleotide probes. One or more primary oligonucleotide primer sets are then provided. Each primer set comprises (a) a first primary oligonucleotide primer comprising a nucleotide sequence that is complementary to the internal primer-specific portion of the first oligonucleotide probe, and (b) a second primary oligonucleotide primer comprising a 5′ primer-specific portion and a 3′ portion, wherein the second primary oligonucleotide primer may be the same or may differ from other second primary oligonucleotide primers in other sets. The one or more ligation reaction mixtures comprising chimeric nucleic acid molecules, the one or more primary oligonucleotide primer sets, a deoxynucleotide mix, and a reverse transcriptase and a DNA polymerase or a DNA polymerase with reverse-transcriptase activity are blended to form one or more reverse-transcription/polymerase chain reaction mixtures. The one or more reverse-transcription/polymerase chain reaction mixtures are subjected to conditions suitable for generating complementary deoxyribonucleic acid (cDNA) molecules to the chimeric nucleic acid molecules, and to one or more polymerase chain reaction cycles comprising a denaturation treatment, a hybridization treatment, and an extension treatment thereby forming one or more different primary reverse-transcription/polymerase chain reaction products comprising the 5′ primer-specific portion, a nucleotide sequence corresponding to the target miRNA molecule sequence, and the complement of the internal primer-specific portion, and complements thereof. The method further comprises providing one or more secondary oligonucleotide primer sets. Each secondary oligonucleotide primer set comprises (a) a first secondary oligonucleotide primer having a 5′ primer-specific portion and a 3′ portion that is complementary to a portion of an extension product formed from the first primary oligonucleotide primer and (b) a second secondary oligonucleotide primer having a 5′ primer-specific portion and a 3′ portion that comprises a nucleotide sequence that is complementary to a portion of an extension product formed from the first secondary oligonucleotide primer. The primary reverse-transcription/polymerase chain reaction products, the one or more secondary oligonucleotide primer sets, a deoxynucleotide mix, and a DNA polymerase are blended to form one or more first polymerase chain reaction mixtures, and the one or more first polymerase chain reaction mixtures are subjected to conditions suitable for two or more polymerase chain reaction cycles comprising a denaturation treatment, a hybridization treatment, and an extension treatment, thereby forming first polymerase chain reaction products comprising a 5′ primer-specific portion of the first secondary oligonucleotide primer, a nucleotide sequence corresponding to the target miRNA molecule sequence or a complement thereof, and a complement of the other 5′ primer-specific portion second secondary oligonucleotide primer. The method further involves providing one or more tertiary oligonucleotide primer sets. Each tertiary oligonucleotide primer set comprises (a) a first tertiary oligonucleotide primer comprising the same nucleotide sequence as the 5′ primer-specific portion of the first polymerase chain reaction products or their complements and (b) a second tertiary oligonucleotide primer comprising a nucleotide sequence that is complementary to the 3′ primer-specific portion of the first polymerase chain reaction products or their complements. The first polymerase chain reaction process products, the one or more tertiary oligonucleotide primer sets, the one or more enzymes capable of digesting deoxyuracil (dU)-containing nucleic acid molecules, a deoxynucleotide mix including dUTP, and a DNA polymerase are blended to form one or more second polymerase chain reaction mixtures, and the one or more second polymerase chain reaction mixtures are subjected to conditions suitable for digesting deoxyuracil (dU) containing nucleic acid molecules present in the second polymerase chain reaction mixtures and for carrying out one or more polymerase chain reaction cycles comprising a denaturation treatment, a hybridization treatment, and an extension treatment thereby forming second polymerase chain reaction products. The method further comprises detecting and distinguishing the second polymerase chain reaction products, thereby identifying one or more target miRNA molecules differing in sequence from other miRNA molecules in the sample by one or more bases.

[0241] FIG. 30 illustrates an embodiment of this aspect of the present application.

[0242] FIG. 30 illustrates an exemplary Ligation-RT-PCR-qPCR carryover prevention reaction to quantify miRNA. For accurate enumeration, aliquot into 12, 24, 36, or 48 wells prior to PCR. For higher copy number, distribute equally in 13 wells, dilute last well equally into 13 additional wells, and repeat for remaining wells. This method involves isolating miRNA from exosomes and treating with UDG for carryover prevention (FIG. 30, step B). An oligonucleotide probe having a portion that is complementary to the 3′ end of the target miRNA, and containing a stem-loop, tag (Di′), and blocking group (filled circle) is ligated at its 5′ end to the 3′ end of the target miRNA. The ligation product comprises the miRNA, Di′ tag, the blocking group, and a sequence complementary to the 3′ portion of the miRNA (FIG. 30, step B). A reverse transcriptase extends primer (Di) to make a full-length copy of the target and appends three C bases to the 3′ end of extended target sequence (FIG. 30, step B). Tag oligonucleotide (Ei) having the 3′ rGrG+G hybridizes to the three C bases of the extended target sequence as shown in FIG. 30, step B. The reverse transcriptase undergoes strand switching and copies the Ei tag sequence. Activate Taq polymerase and perform limited cycle PCR amplification (8-20), using tag primers (Di, Ei), to maintain relative ratios of different amplicons.

[0243] As shown in FIG. 30, step C, following the limited cycle PCR, the PCR products are aliquoted into separate wells, micro-pores or droplets containing Taqman™ probes across the miRNA target region, miRNA-specific (forward) primers comprising 5′ primer-specific portions (Ai), cDNA-specific (reverse) primers comprising 5′ primer-specific portions (Ci) and matching primers Ai and Ci. These primers combine to amplify the target miRNA sequence, if present in the sample (FIG. 30, step C). Primers are unblocked with RNaseH2 only when bound to correct target. Following PCR, the products can be detected using pairs of matched primers Ai and Ci, and TaqMan™ probes that span the target miRNA regions as described supra for FIG. 4 (see FIG. 30, steps C-F), or using other suitable means known in the art.

[0244] In one embodiment, the 3′ portion of the second primary oligonucleotide primer comprises ribo-G and/or G nucleotide analogue, wherein the reverse transcriptase appends two or three cytosine nucleotides to the 3′ end of the complementary deoxyribonucleic acid products of the target miRNAs, enabling transient hybridization to the 3′ end of the second primary oligonucleotide primer, enabling the reverse transcriptase to undergo strand switching and to extend the complementary deoxyribonucleic acid products to include the complementary sequence of the 5′ primer-specific portion of the second primary oligonucleotide primer to form the one or more different first polymerase chain reaction products comprising a 5′ primer-specific portion, a nucleotide sequence portion corresponding to the target miRNA molecule sequence or a complement thereof, a further portion, and a complement of the other 5′ primer-specific portion.

[0245] In another embodiment, the 3′ portion of the second primary oligonucleotide primers contains from 6 to 14 bases comprising, from 5′ to 3′, three ribo-G or G bases, followed by additional bases that are the same as the 5′ end of the target miRNA sequences, wherein the reverse transcriptase appends two or three cytosine residues to the 3′ end of the initial complementary deoxyribonucleic acid extension products of the target miRNAs, and wherein subsequent to when the denaturation treatment of the polymerase chain reaction is initiated the conditions are adjusted to enable transient hybridization to the 3′ end of the second primary oligonucleotide primers to the 3′ end of the complementary deoxyribonucleic acid extension products, allowing for extension of either one or both the second primary oligonucleotide primers and the complementary deoxyribonucleic acid extension products to form the one or more different primary reverse-transcription/polymerase chain reaction products comprising a 5′ primer-specific portion, a nucleotide sequence portion corresponding to the target miRNA molecule sequence or a complement thereof, a further portion, and a complement of the other 5′ primer-specific portion.

[0246] In certain embodiments, the second oligonucleotide probe of the oligonucleotide probe set further comprises a unitaq detection portion, thereby forming ligated product sequences comprising the 5′ primer-specific portion, the target-specific portions, the unitaq detection portion, and the 3′ primer-specific portion. In accordance with this embodiment, one or more unitaq detection probes are provided, wherein each unitaq detection probe hybridizes to a complementary unitaq detection portion and said detection probe comprises a quencher molecule and a detectable label separated from the quencher molecule. The one or more unitaq detection probes are added to the second polymerase chain reaction mixture, and the one or more unitaq detection probes are hybridized to complementary unitaq detection portions on the ligated product sequence or complement thereof during said subjecting the second polymerase chain reaction mixture to conditions suitable for one or more polymerase chain reaction cycles, wherein the quencher molecule and the detectable label are cleaved from the one or more unitaq detection probes during the extension treatment and said detecting involves the detection of the cleaved detectable label.

[0247] In another embodiment, one primary oligonucleotide primer or one secondary oligonucleotide primer further comprises a unitaq detection portion, thereby forming extension product sequences comprising the 5′ primer-specific portion, the target-specific portions, the unitaq detection portion, and the complement of the other 5′ primer-specific portion, and complements thereof. In accordance with this embodiment, one or more unitaq detection probes are provided, wherein each unitaq detection probe hybridizes to a complementary unitaq detection portion and said detection probe comprises a quencher molecule and a detectable label separated from the quencher molecule. The one or more unitaq detection probes are added to the one or more first or second polymerase chain reaction mixtures, and the one or more unitaq detection probes are hybridized to complementary unitaq detection portions on the ligated product sequence or complement thereof during polymerase chain reaction cycles after the first polymerization chain reaction, wherein the quencher molecule and the detectable label are cleaved from the one or more unitaq detection probes during the extension treatment and said detecting involves the detection of the cleaved detectable label.

[0248] In another embodiment, one or both oligonucleotide probes of the oligonucleotide probe set comprises a portion that has no or one nucleotide sequence mismatch when hybridized in a base-specific manner to the target nucleic acid sequence or bisulfite-converted methylated nucleic acid sequence or complement sequence thereof, but have one or more additional nucleotide sequence mismatches that interferes with ligation when said oligonucleotide probe hybridizes in a base-specific manner to a corresponding nucleotide sequence portion in the wildtype nucleic acid sequence or bisulfite-converted unmethylated nucleic acid sequence or complement sequence thereof.

[0249] In one embodiment, the 3′ portion of the first oligonucleotide probe of the oligonucleotide probe set comprises a cleavable nucleotide or nucleotide analogue and a blocking group, such that the 3′ end is unsuitable for polymerase extension or ligation. The cleavable nucleotide or nucleotide analog of the first oligonucleotide probe is cleaved when said probe is hybridized to it complementary target nucleotide sequence of the primary extension product, thereby liberating a 3′OH on the first oligonucleotide probe prior to the ligating.

[0250] The one or more first oligonucleotide probe of the oligonucleotide probe set may comprises a sequence that differs from the target nucleic acid sequence or bisulfite-converted methylated nucleic acid sequence or complement sequence thereof, said difference is located two or three nucleotide bases from the liberated free 3′OH end.

[0251] In a further embodiment, the second oligonucleotide probe has, at its 5′ end, an overlapping identical nucleotide with the 3′ end of the first oligonucleotide probe, and, upon hybridization of the first and second oligonucleotide probes of a probe set at adjacent positions on a complementary target nucleotide sequence of a primary extension product to form a junction, the overlapping identical nucleotide of the second oligonucleotide probe forms a flap at the junction with the first oligonucleotide probe. This embodiment further comprises cleaving the overlapping identical nucleotide of the second oligonucleotide probe with an enzyme having 5′ nuclease activity thereby liberating a phosphate at the 5′ end of the second oligonucleotide probe prior to said ligating.

[0252] In other embodiments, the one or more oligonucleotide probe sets further comprise a third oligonucleotide probe having a target-specific portion, wherein the second and third oligonucleotide probes of a probe set are configured to hybridize adjacent to one another on the target nucleotide sequence with a junction between them to allow ligation between the second and third oligonucleotide probes to form a ligated product sequence comprising the first, second, and third oligonucleotide probes of a probe set.

[0253] In certain embodiments, the sample is selected from the group consisting of tissue, cells, serum, blood, plasma, amniotic fluid, sputum, urine, bodily fluids, bodily secretions, bodily excretions, cell-free circulating nucleic acids, cell-free circulating tumor nucleic acids, cell-free circulating fetal nucleic acids in pregnant woman, circulating tumor cells, tumor, tumor biopsy, and exosomes.

[0254] The one or more target nucleotide sequences may be low-abundance nucleic acid molecules comprising one or more nucleotide base mutations, insertions, deletions, translocations, splice variants, miRNA variants, alternative transcripts, alternative start sites, alternative coding sequences, alternative non-coding sequences, alternative splicings, exon insertions, exon deletions, intron insertions, or other rearrangement at the genome level and/or methylated nucleotide bases.

[0255] As used herein “low abundance nucleic acid molecule” refers to a target nucleic acid molecule that is present at levels as low as 1% to 0.01% of the sample. In other words, a low abundance nucleic acid molecule with one or more nucleotide base mutations, insertions, deletions, translocations, splice variants, miRNA variants, alternative transcripts, alternative start sites, alternative coding sequences, alternative non-coding sequences, alternative splicings, exon insertions, exon deletions, intron insertions, other rearrangement at the genome level, and/or methylated nucleotide bases can be distinguished from a 100 to 10,000-fold excess of nucleic acid molecules in the sample (i.e., high abundance nucleic acid molecules) having a similar nucleotide sequence as the low abundance nucleic acid molecules but without the one or more nucleotide base mutations, insertions, deletions, translocations, splice variants, miRNA variants, alternative transcripts, alternative start sites, alternative coding sequences, alternative non-coding sequences, alternative splicings, exon insertions, exon deletions, intron insertions, other rearrangement at the genome level, and/or methylated nucleotide bases.

[0256] In some embodiments of the present invention, the copy number of one or more low abundance target nucleotide sequences are quantified relative to the copy number of high abundance nucleic acid molecules in the sample having a similar nucleotide sequence as the low abundance nucleic acid molecules. In other embodiments of the present invention, the one or more target nucleotide sequences are quantified relative to other nucleotide sequences in the sample. In other embodiments of the present invention, the relative copy number of one or more target nucleotide sequences is quantified. Methods of relative and absolute (i.e., copy number) quantitation are well known in the art.

[0257] The low abundance target nucleic acid molecules to be detected can be present in any biological sample, including, without limitation, tissue, cells, serum, blood, plasma, amniotic fluid, sputum, urine, bodily fluids, bodily secretions, bodily excretions, cell-free circulating nucleic acids, cell-free circulating tumor nucleic acids, cell-free circulating fetal nucleic acids in pregnant woman, circulating tumor cells, tumor, tumor biopsy, and exosomes.

[0258] The methods of the present invention are suitable for diagnosing or prognosing a disease state and/or distinguishing a genotype or disease predisposition.

[0259] Another aspect of the present application is directed to a method for identifying, in a sample, one or more target micro-ribonucleic acid (miRNA) molecules differing in sequence from other miRNA molecules in the sample by one or more bases. The method involves providing a sample containing one or more target miRNA molecules potentially differing in sequence from other miRNA molecules in the sample by one or more bases and providing one or more enzymes capable of digesting deoxyuracil (dU)-containing nucleic acid molecules present in the sample. The sample is contacted with one or more enzymes capable of digesting dU-containing nucleic acid molecules potentially present in the sample. The contacted sample is blended with ATP and a Poly(A) polymerase to form a Poly(A) polymerase reaction mixture, and the Poly(A) polymerase reaction mixture is subjected to conditions suitable for appending homopolymer A to the 3′ ends of the one or more target miRNA molecules potentially present in the sample. The method further involves providing one or more primary oligonucleotide primer sets. Each primer set comprises (a) a first primary oligonucleotide primer comprising a 5′ primer-specific portion, an internal poly dT portion, and a 3′ portion comprising from 1 to 10 bases complementary to the 3′ end of the target miRNA, wherein the first primary oligonucleotide primer may be the same or may differ from other first primary oligonucleotide primers in other sets, and (b) a second primary oligonucleotide primer comprising a 5′ primer-specific portion and a 3′ portion, wherein the second primary oligonucleotide primer may be the same or may differ from other second primary oligonucleotide primers in other sets. The Poly(A) polymerase reaction mixture, the one or more primary oligonucleotide primer sets, the one or more enzymes capable of digesting deoxyuracil (dU)-containing nucleic acid molecules in the sample, a deoxynucleotide mix including dUTP, and a reverse transcriptase and a DNA polymerase or a DNA polymerase with reverse-transcriptase activity are blended to form one or more reverse-transcription/polymerase chain reaction mixtures. The one or more reverse-transcription/polymerase chain reaction mixtures are subjected to conditions suitable for digesting deoxyuracil (dU)-containing nucleic acid molecules present in the reverse-transcription/polymerase chain reaction mixtures, then to conditions suitable for generating complementary deoxyribonucleic acid (cDNA) molecules to the target miRNA sequences with 3′ polyA tails, and to one or more polymerase chain reaction cycles comprising a denaturation treatment, a hybridization treatment, and an extension treatment thereby forming one or more different reverse-transcription/polymerase chain reaction products comprising the 5′ primer-specific portion of the second primary oligonucleotide primer, a nucleotide sequence corresponding to the target miRNA molecule sequence, a poly dA region, and the complement of the 5′ primer-specific portion of the first primary oligonucleotide primer, and complements thereof. The method further comprises providing one or more oligonucleotide probe sets. Each probe set comprises (a) a first oligonucleotide probe having a 5′ primer-specific portion and a 3′ target sequence-specific portion, and (b) a second oligonucleotide probe having a 5′ target sequence-specific portion, a portion complementary to the one or more reverse-transcription/polymerase chain reaction products, and a 3′ primer-specific portion, wherein the first and second oligonucleotide probes of a probe set are configured to hybridize, in a base specific manner, to complementary portions of the one or more reverse-transcription/polymerase chain reaction products corresponding to the target miRNA molecule sequence, or complement thereof. The one or more reverse-transcription/polymerase chain reaction products are contacted with a ligase and the one or more oligonucleotide probe sets to form one or more ligation reaction mixtures, and the one or more ligation reaction mixtures are subjected to one or more ligation reaction cycles whereby the first and second oligonucleotide probes of the one or more oligonucleotide probe sets, when hybridized to their complement, are ligated together to form ligated product sequences in the ligation reaction mixture, wherein each ligated product sequence comprises the 5′ primer-specific portion, the target-specific portions, and the 3′ primer-specific portion. The method further involves providing one or more secondary oligonucleotide primer sets. Each secondary oligonucleotide primer set comprises (a) a first secondary oligonucleotide primer comprising the same nucleotide sequence as the 5′ primer-specific portion of the ligated product sequence and (b) a second secondary oligonucleotide primer comprising a nucleotide sequence that is complementary to the 3′ primer-specific portion of the ligated product sequence. The ligated product sequences and the one or more secondary oligonucleotide primer sets are blended with one or more enzymes capable of digesting deoxyuracil (dU)-containing nucleic acid molecules, a deoxynucleotide mix including dUTP, and a DNA polymerase to form one or more first polymerase chain reaction mixtures, and the one or more first polymerase chain reaction mixtures are subjected to conditions suitable for digesting deoxyuracil (dU)-containing nucleic acid molecules present in the first polymerase chain reaction mixtures and for carrying out one or more polymerase chain reaction cycles comprising a denaturation treatment, a hybridization treatment, and an extension treatment thereby forming secondary polymerase chain reaction products. The method further comprises detecting and distinguishing the secondary polymerase chain reaction products, thereby identifying one or more target miRNA molecules differing in sequence from other miRNA molecules in the sample by one or more bases.

[0260] FIG. 31 illustrates an embodiment of this aspect of the present application.

[0261] FIG. 31 illustrates an exemplary RT-PCR-LDR-qPCR carryover prevention reaction to quantify miRNA. For accurate enumeration, aliquot into 12, 24, 36, or 48 wells prior to PCR. For higher copy number, distribute equally in 13 wells, dilute last well equally into 13 additional wells, and repeat for remaining wells. This method involves isolating miRNA from exosomes and treating with UDG for carryover prevention (FIG. 31, step B). PolyA tail miRNA with E. coli Poly(A) polymerase. A reverse transcriptase extends primer comprising a Tag Di on the 5′ end, and a T30VN sequence at the 3′ end, to make a full-length copy of the target, and appends three C bases to the 3′ end of extended target sequence (FIG. 31, step B). Tag oligonucleotide (Ei) having the 3′ rGrG+G hybridizes to the three C bases of the extended target sequence as shown in FIG. 31, step B. The reverse transcriptase undergoes strand switching and copies the Ei tag sequence. Activate Taq polymerase and perform limited cycle PCR amplification (12-20), using dUTP, using tag primers (Di, Ei), to maintain relative ratios of different amplicons. The PCR products incorporate dU, allowing for carryover prevention (FIG. 31, step C).

[0262] As shown in FIG. 31, step D miRNA sequence-specific ligation probes containing primer-specific portions (Ai, Ci′) suitable for subsequent PCR amplification, hybridize to their corresponding target sequence in a base-specific manner. Following ligation, the ligation products can be detected using pairs of matched primers Ai and Ci, and TaqMan™ probes that span the ligation junction as described supra for FIG. 2 (see FIG. 31, steps D-F), or using other suitable means known in the art.

[0263] Another aspect of the present application is directed to a method for identifying, in a sample, one or more target micro-ribonucleic acid (miRNA) molecules differing in sequence from other miRNA molecules in the sample by one or more bases. The method involves providing a sample containing one or more target miRNA molecules potentially differing in sequence from other miRNA molecules in the sample by one or more bases and providing one or more enzymes capable of digesting deoxyuracil (dU)-containing nucleic acid molecules present in the sample. The sample is contacted with one or more enzymes capable of digesting dU-containing nucleic acid molecules potentially present in the sample. The contacted sample is blended with ATP and a Poly(A) polymerase to form a Poly(A) polymerase reaction mixture, and the Poly(A) polymerase reaction mixture is subjected to conditions suitable for appending a homopolymer A to the 3′ ends of the one or more target miRNA molecules potentially present in the sample. The method further involves providing one or more primary oligonucleotide primer sets. Each primer set comprises (a) a first primary oligonucleotide primer comprising a 5′ primer-specific portion, an internal poly dT portion, and a 3′ portion comprising from 1 to 10 bases complementary to the 3′ end of the target miRNA, wherein the first primary oligonucleotide primer may be the same or may differ from other first primary oligonucleotide primers in other sets, and (b) a second primary oligonucleotide primer comprising a 5′ primer-specific portion and a 3′ portion, wherein the second primary oligonucleotide primer may be the same or may differ from other second primary oligonucleotide primers in other sets. The Poly(A) polymerase reaction mixture potentially comprising target miRNA sequences is blended with 3′ polyA tails, the one or more primary oligonucleotide primer sets, a deoxynucleotide mix, and a reverse transcriptase and a DNA polymerase or a DNA polymerase with reverse-transcriptase activity to form one or more reverse-transcription/polymerase chain reaction mixtures. The one or more reverse-transcription/polymerase chain reaction mixtures are subjected to conditions suitable for generating complementary deoxyribonucleic acid (cDNA) molecules to the target miRNA sequences with 3′ polyA tails, and to one or more polymerase chain reaction cycles comprising a denaturation treatment, a hybridization treatment, and an extension treatment, thereby forming one or more different reverse-transcription/polymerase chain reaction products comprising the 5′ primer-specific portion of the second primary oligonucleotide primer, a nucleotide sequence corresponding to the target miRNA molecule sequence, a poly dA region, and the complement of the 5′ primer-specific portion of the first primary oligonucleotide primer, and complements thereof. The method further comprises providing one or more secondary oligonucleotide primer sets. Each secondary oligonucleotide primer set comprises (a) a first secondary oligonucleotide primer having a 5′ primer-specific portion and a 3′ portion that is complementary to a portion of a reverse-transcription/polymerase chain reaction product formed from the first primary oligonucleotide primer and (b) a second secondary oligonucleotide primer having a 5′ primer-specific portion and a 3′ portion that comprises a nucleotide sequence that is complementary to a portion of a reverse-transcription/polymerase chain reaction product formed from the first secondary oligonucleotide primer. The reverse-transcription/polymerase chain reaction products, the one or more secondary oligonucleotide primer sets, a deoxynucleotide mix, and a DNA polymerase are blended to form one or more first polymerase chain reaction mixtures, and the one or more first polymerase chain reaction mixtures are subjected to conditions suitable for two or more polymerase chain reaction cycles comprising a denaturation treatment, a hybridization treatment, and an extension treatment, thereby forming first polymerase chain reaction products comprising a 5′ primer-specific portion, a nucleotide sequence corresponding to the target miRNA molecule sequence or a complement thereof, and a complement of the other 5′ primer-specific portion. The method further involves providing one or more tertiary oligonucleotide primer sets. Each tertiary oligonucleotide primer set comprises (a) a first tertiary oligonucleotide primer comprising the same nucleotide sequence as the 5′ primer-specific portion of the first polymerase chain reaction product sequence and (b) a second tertiary oligonucleotide primer comprising a nucleotide sequence that is complementary to the 3′ primer-specific portion of the first polymerase chain reaction product sequence. The first polymerase chain reaction products, the one or more tertiary oligonucleotide primer sets, the one or more enzymes capable of digesting deoxyuracil (dU) containing nucleic acid molecules, a deoxynucleotide mix including dUTP, and a DNA polymerase are blended to form one or more second polymerase chain reaction mixtures. The one or more second polymerase chain reaction mixtures are subjected to conditions suitable for digesting deoxyuracil (dU)-containing nucleic acid molecules present in the first polymerase chain reaction mixtures, and one or more polymerase chain reaction cycles comprising a denaturation treatment, a hybridization treatment, and an extension treatment thereby forming second polymerase chain reaction products. The method further comprises detecting and distinguishing the second polymerase chain reaction products in the one or more reactions thereby identifying one or more target miRNA molecules differing in sequence from other miRNA molecules in the sample by one or more bases.

[0264] FIG. 32 illustrates an embodiment of this aspect of the present application.

[0265] FIG. 32 illustrates an exemplary RT-PCR-qPCR carryover prevention reaction to quantify miRNA. For accurate enumeration, aliquot into 12, 24, 36, or 48 wells prior to PCR. For higher copy number, distribute equally in 13 wells, dilute last well equally into 13 additional wells, and repeat for remaining wells. This method involves isolating miRNA from exosomes and treating with UDG for carryover prevention (FIG. 32, step B). PolyA tail miRNA with E. coli Poly(A) polymerase. A reverse transcriptase extends primer comprising a Tag Di on the 5′ end, and a T30VN sequence at the 3′ end, to make a full-length copy of the target, and appends three C bases to the 3′ end of extended target sequence (FIG. 32, step B). Tag oligonucleotide (Ei) having the 3′ rGrG+G hybridizes to the three C bases of the extended target sequence as shown in FIG. 32, step B. The reverse transcriptase undergoes strand switching and copies the Ei tag sequence. Activate Taq polymerase and perform limited cycle PCR amplification (8-20), using dUTP, using tag primers (Di, Ei), to maintain relative ratios of different amplicons.

[0266] As shown in FIG. 32, step C, following the limited cycle PCR, the PCR products are aliquoted into separate wells, micro-pores or droplets containing Taqman™ probes across the miRNA target region, miRNA-specific (forward) primers comprising 5′ primer-specific portions (Ai), cDNA-specific (reverse) primers comprising 5′ primer-specific portions (Ci) and matching primers Ai and Ci. These primers combine to amplify the target miRNA sequence, if present in the sample (FIG. 32, step C). Primers are unblocked with RNaseH2 only when bound to correct target. Following PCR, the products can be detected using pairs of matched primers Ai and Ci, and TaqMan™ probes that span the target miRNA regions as described supra for FIG. 6 (see FIG. 32, steps C-F), or using other suitable means known in the art.

[0267] Another aspect of the present application is directed to a method of diagnosing or prognosing a disease state of cells or tissue based on identifying the presence or level of a plurality of disease-specific and/or cell/tissue-specific DNA, RNA, and/or protein markers in a biological sample of an individual. The plurality of markers is in a set comprising from 6-12 markers, 12-24 markers, 24-36 markers, 36-48 markers, 48-72 markers, 72-96 markers, or >96 markers. Each marker in a given set is selected by having any one or more of the following criteria: present, or above a cutoff level, in >50% of biological samples of the disease cells or tissue from individuals diagnosed with the disease state; absent, or below a cutoff level, in >95% of biological samples of the normal cells or tissue from individuals without the disease state; present, or above a cutoff level, in >50% of biological samples comprising cells, serum, blood, plasma, amniotic fluid, sputum, urine, bodily fluids, bodily secretions, bodily excretions, or fractions thereof, from individuals diagnosed with the disease state; absent, or below a cutoff level, in >95% of biological samples comprising cells, serum, blood, plasma, amniotic fluid, sputum, urine, bodily fluids, bodily secretions, bodily excretions, or fractions thereof, from individuals without the disease state; present with a z-value of >1.65 in the biological sample comprising cells, serum, blood, plasma, amniotic fluid, sputum, urine, bodily fluids, bodily secretions, bodily excretions, or fractions thereof, from individuals diagnosed with the disease state. At least 50% of the markers in a set each comprise one or more methylated residues, and/or at least 50% of the markers in a set that are present, or above a cutoff level, or present with a z-value of >1.65, comprise of one or more methylated residues, in the biological sample comprising cells, serum, blood, plasma, amniotic fluid, sputum, urine, bodily fluids, bodily secretions, bodily excretions, or fractions thereof, from at least 50% of individuals diagnosed with the disease state. The method involves obtaining a biological sample. The biological sample includes cell-free DNA, RNA, and/or protein originating from the cells or tissue and from one or more other tissues or cells, and the biological sample is selected from the group consisting of cells, serum, blood, plasma, amniotic fluid, sputum, urine, bodily fluids, bodily secretions, and bodily excretions, or fractions thereof. The sample is fractionated into one or more fractions, wherein at least one fraction comprises exosomes, tumor-associated vesicles, other protected states, or cell-free DNA, RNA, and/or protein. Nucleic acid molecules in the one or more fractions are subjected to a bisulfite treatment under conditions suitable to convert unmethylated cytosine residues to uracil residues. At least two enrichment steps are carried out for 50% or more disease-specific and/or cell/tissue-specific DNA, RNA, and/or protein markers during either said fractionating and/or by carrying out a nucleic acid amplification step. The method further involves performing one or more assays to detect and distinguish the plurality of disease-specific and/or cell/tissue-specific DNA, RNA, and/or protein markers, thereby identifying their presence or levels in the sample, wherein individuals are diagnosed or prognosed with the disease state if a minimum of 2 or 3 markers are present or are above a cutoff level in a marker set comprising from 6-12 markers; or a minimum of 3, 4, or 5 markers are present or are above a cutoff level in a marker set comprising from 12-24 markers; or a minimum of 3, 4, 5, or 6 markers are present or are above a cutoff level in a marker set comprising from 24-36 markers; or a minimum of 4, 5, 6, 7, or 8 markers are present or are above a cutoff level in a marker set comprising from 36-48 markers; or a minimum of 6, 7, 8, 9, 10, 11, or 12 markers are present or are above a cutoff level in a marker set comprising from 48-72 markers, or a minimum of 7, 8, 9, 10, 11, 12 or 13 markers are present or are above a cutoff level in a marker set comprising from 72-96 markers, or a minimum of 8, 9, 10, 11, 12, 13 or “n”/12 markers are present or are above a cutoff level in a marker set comprising 96−“n” markers, when “n”>168 markers.

[0268] Another aspect of the present application is directed to a method of diagnosing or prognosing a disease state of a solid tissue cancer including colorectal adenocarcinoma, stomach adenocarcinoma, esophageal carcinoma, breast lobular and ductal carcinoma, uterine corpus endometrial carcinoma, ovarian serous cystadenocarcinoma, cervical squamous cell carcinoma and adenocarcinoma, uterine carcinosarcoma, lung adenocarcinoma, lung squamous cell carcinoma, head & neck squamous cell carcinoma, prostate adenocarcinoma, invasive urothelial bladder cancer, liver hepatoceullular carcinoma, pancreatic ductal adenocarcinoma, or gallbladder adenocarcinoma based on identifying the presence or level of a plurality of disease-specific and/or cell/tissue-specific DNA, RNA, and/or protein markers in a biological sample of an individual. The plurality of markers is in a set comprising from 48-72 total cancer markers, 72-96 total cancer markers or ≥96 total cancer markers, wherein on average greater than one quarter such markers in a given set cover each of the aforementioned major cancers being tested. Each marker in a given set for a given solid tissue cancer is selected by having any one or more of the following criteria for that solid tissue cancer: present, or above a cutoff level, in >50% of biological samples of a given cancer tissue from individuals diagnosed with a given solid tissue cancer; absent, or below a cutoff level, in >95% of biological samples of the normal tissue from individuals without that given solid tissue cancer; present, or above a cutoff level, in >50% of biological samples comprising cells, serum, blood, plasma, amniotic fluid, sputum, urine, bodily fluids, bodily secretions, bodily excretions, or fractions thereof, from individuals diagnosed with a given solid tissue cancer; absent, or below a cutoff level, in >95% of biological samples comprising cells, serum, blood, plasma, amniotic fluid, sputum, urine, bodily fluids, bodily secretions, bodily excretions, or fractions thereof, from individuals without that given solid tissue cancer; present with a z-value of >1.65 in the biological sample comprising cells, serum, blood, plasma, amniotic fluid, sputum, urine, bodily fluids, bodily secretions, bodily excretions, or fractions thereof, from individuals diagnosed with a given solid tissue cancer. At least 50% of the markers in a set each comprise one or more methylated residues, and/or at least 50% of the markers in a set that are present, or above a cutoff level, or present with a z-value of >1.65, comprise of one or more methylated residues, in the biological sample comprising cells, serum, blood, plasma, amniotic fluid, sputum, urine, bodily fluids, bodily secretions, bodily excretions, or fractions thereof, from at least 50% of individuals diagnosed with a given solid tissue cancer. The method involves obtaining a biological sample including cell-free DNA, RNA, and/or protein originating from the cells or tissue and from one or more other tissues or cells, wherein the biological sample is selected from the group consisting of cells, serum, blood, plasma, amniotic fluid, sputum, urine, bodily fluids, bodily secretions, and bodily excretions, or fractions thereof. The sample is fractionated into one or more fractions, wherein at least one fraction comprises exosomes, tumor-associated vesicles, other protected states, or cell-free DNA, RNA, and/or protein. The nucleic acid molecules in the one or more fractions are subjected to a bisulfite treatment under conditions suitable to convert unmethylated cytosine residues to uracil residues. At least two enrichment steps are carried out for 50% or more of the given solid tissue cancer-specific and/or cell/tissue-specific DNA, RNA, and/or protein markers during either said fractionating and/or by carrying out a nucleic acid amplification step. The method further involves performing one or more assays to detect and distinguish the plurality of cancer-specific and/or cell/tissue-specific DNA, RNA, and/or protein markers, thereby identifying their presence or levels in the sample, wherein individuals are diagnosed or prognosed with the a solid-tissue cancer if a minimum of 4 markers are present or are above a cutoff level in a marker set comprising from 48-72 total cancer markers; or a minimum of 5 markers are present or are above a cutoff level in a marker set comprising from 72-96 total cancer markers; or a minimum of 6 or “n”/18 markers are present or are above a cutoff level in a marker set comprising 96 to “n” total cancer markers, when “n”>96 total cancer markers.

[0269] In accordance with this aspect of the present application, each marker in a given set for a given solid tissue cancer may be selected by having any one or more of the following criteria for that solid tissue cancer: present, or above a cutoff level, in >66% of biological samples of a given cancer tissue from individuals diagnosed with a given solid tissue cancer; absent, or below a cutoff level, in >95% of biological samples of the normal tissue from individuals without that given solid tissue cancer; present, or above a cutoff level, in >66% of biological samples comprising cells, serum, blood, plasma, amniotic fluid, sputum, urine, bodily fluids, bodily secretions, bodily excretions, or fractions thereof, from individuals diagnosed with a given solid tissue cancer; absent, or below a cutoff level, in >95% of biological samples comprising cells, serum, blood, plasma, amniotic fluid, sputum, urine, bodily fluids, bodily secretions, bodily excretions, or fractions thereof, from individuals without that given solid tissue cancer; present with a z-value of >1.65 in the biological sample comprising cells, serum, blood, plasma, amniotic fluid, sputum, urine, bodily fluids, bodily secretions, bodily excretions, or fractions thereof, from individuals diagnosed with a given solid tissue cancer.

[0270] Another aspect of the present application is directed to a method of diagnosing or prognosing a disease state of and identifying the most likely specific tissue(s) of origin of a solid tissue cancer in the following groups: Group 1 (colorectal adenocarcinoma, stomach adenocarcinoma, esophageal carcinoma); Group 2 (breast lobular and ductal carcinoma, uterine corpus endometrial carcinoma, ovarian serous cystadenocarcinoma, cervical squamous cell carcinoma and adenocarcinoma, uterine carcinosarcoma); Group 3 (lung adenocarcinoma, lung squamous cell carcinoma, head & neck squamous cell carcinoma); Group 4 (prostate adenocarcinoma, invasive urothelial bladder cancer); and/or Group 5 (liver hepatoceullular carcinoma, pancreatic ductal adenocarcinoma, or gallbladder adenocarcinoma) based on identifying the presence or level of a plurality of disease-specific and/or cell/tissue-specific DNA, RNA, and/or protein markers in a biological sample of an individual, wherein the plurality of markers is in a set comprising from 36-48 group-specific cancer markers, 48-64 group-specific cancer markers, or ≥64 group-specific cancer markers, wherein on average greater than one third of such markers in a given set cover each of the aforementioned cancers being tested within that group. Each marker in a given set for a given solid tissue cancer is selected by having any one or more of the following criteria for that solid tissue cancer: present, or above a cutoff level, in >50% of biological samples of a given cancer tissue from individuals diagnosed with a given solid tissue cancer; absent, or below a cutoff level, in >95% of biological samples of the normal tissue from individuals without that given solid tissue cancer; present, or above a cutoff level, in >50% of biological samples comprising cells, serum, blood, plasma, amniotic fluid, sputum, urine, bodily fluids, bodily secretions, bodily excretions, or fractions thereof, from individuals diagnosed with a given solid tissue cancer; absent, or below a cutoff level, in >95% of biological samples comprising cells, serum, blood, plasma, amniotic fluid, sputum, urine, bodily fluids, bodily secretions, bodily excretions, or fractions thereof, from individuals without that given solid tissue cancer; present with a z-value of >1.65 in the biological sample comprising cells, serum, blood, plasma, amniotic fluid, sputum, urine, bodily fluids, bodily secretions, bodily excretions, or fractions thereof, from individuals diagnosed with a given solid tissue cancer. At least 50% of the markers in a set each comprise one or more methylated residues, and/or at least 50% of the markers in a set that are present, or above a cutoff level, or present with a z-value of >1.65 comprise one or more methylated residues, in the biological sample comprising cells, serum, blood, plasma, amniotic fluid, sputum, urine, bodily fluids, bodily secretions, bodily excretions, or fractions thereof, from at least 50% of individuals diagnosed with a given solid tissue cancer. The method involves obtaining the biological sample. The biological sample includes cell-free DNA, RNA, and/or protein originating from the cells or tissue and from one or more other tissues or cells, wherein the biological sample is selected from the group consisting of cells, serum, blood, plasma, amniotic fluid, sputum, urine, bodily fluids, bodily secretions, and bodily excretions, or fractions thereof. The sample is fractionated into one or more fractions, wherein at least one fraction comprises exosomes, tumor-associated vesicles, other protected states, or cell-free DNA, RNA, and/or protein. The nucleic acid molecules in the one or more fractions are subjected to a bisulfite treatment under conditions suitable to convert unmethylated cytosine residues to uracil residues. At least two enrichment steps are carried out for 50% or more of the given solid tissue cancer-specific and/or cell/tissue-specific DNA, RNA, and/or protein markers during either said fractionating and/or by carrying out a nucleic acid amplification step. The method further involves performing one or more assays to detect and distinguish the plurality of cancer-specific and/or cell/tissue-specific DNA, RNA, and/or protein markers, thereby identifying their presence or levels in the sample, wherein individuals are diagnosed or prognosed with a solid-tissue cancer if a minimum of 4 markers are present or are above a cutoff level in a marker set comprising from 36-48 group-specific cancer markers; or a minimum of 5 markers are present or are above a cutoff level in a marker set comprising from 48-64 group-specific cancer markers; or a minimum of 6 or “n”/12 markers are present or are above a cutoff level in a marker set comprising 64 to “n” total cancer markers, when “n”>64 group-specific cancer markers.

[0271] In accordance with this aspect of the present application, each marker in a given set for a given solid tissue cancer may be selected by having any one or more of the following criteria for that solid tissue cancer: present, or above a cutoff level, in >66% of biological samples of a given cancer tissue from individuals diagnosed with a given solid tissue cancer; absent, or below a cutoff level, in >95% of biological samples of the normal tissue from individuals without that given solid tissue cancer; present, or above a cutoff level, in >66% of biological samples comprising cells, serum, blood, plasma, amniotic fluid, sputum, urine, bodily fluids, bodily secretions, bodily excretions, or fractions thereof, from individuals diagnosed with a given solid tissue cancer; absent, or below a cutoff level, in >95% of biological samples comprising cells, serum, blood, plasma, amniotic fluid, sputum, urine, bodily fluids, bodily secretions, bodily excretions, or fractions thereof, from individuals without that given solid tissue cancer; present with a z-value of >1.65 in the biological sample comprising cells, serum, blood, plasma, amniotic fluid, sputum, urine, bodily fluids, bodily secretions, bodily excretions, or fractions thereof, from individuals diagnosed with a given solid tissue cancer.

[0272] In one embodiment, the at least two enrichment steps comprise of two or more of the following steps: capturing or separating exosomes or extracellular vesicles or markers in other protected states; capturing or separating a platelet fraction; capturing or separating circulating tumor cells; capturing or separating RNA-containing complexes; capturing or separating cfDNA-nucleosome or differentially modified cfDNA-histone complexes; capturing or separating protein targets or protein target complexes; capturing or separating auto-antibodies; capturing or separating cytokines; capturing or separating methylated cfDNA; capturing or separating marker specific DNA, cDNA, miRNA, lncRNA, ncRNA, or mRNA, or amplified complements, by hybridization to complementary capture probes in solution, on magnetic beads, or on a microarray; amplifying miRNA markers, non-coding RNA markers (lncRNA & ncRNA markers), mRNA markers, exon markers, splice-variant markers, translocation markers, or copy number variation markers in a linear or exponential manner via a polymerase extension reaction, polymerase chain reaction, bisulfite-methyl-specific polymerase chain reaction, reverse-transcription reaction, bisulfite-methyl-specific ligation reaction, and/or ligation reaction, using DNA polymerase, reverse transcriptase, DNA ligase, RNA ligase, DNA repair enzyme, RNase, RNaseH2, endonuclease, restriction endonuclease, exonuclease, CRISPR, DNA glycosylase or combinations thereof; selectively amplifying one or more target regions containing mutation markers or bisulfite-converted DNA methylation markers, while suppressing amplification of the target regions containing wild-type sequence or bisulfite-converted unmethylated sequence or complement sequence thereof, in a linear or exponential manner via a polymerase extension reaction, polymerase chain reaction, bisulfite-methyl-specific polymerase chain reaction, reverse-transcription reaction, bisulfite-methyl-specific ligation reaction, and/or ligation reaction, using DNA polymerase, reverse transcriptase, DNA ligase, RNA ligase, DNA repair enzyme, RNase, RNaseH2, endonuclease, restriction endonuclease, exonuclease, CRISPR, DNA glycosylase or combinations thereof; preferentially extending, ligating, or amplifying one or more primers or probes whose 3′-OH end has been liberated in an enzyme and sequence-dependent process; using one or more blocking oligonucleotide primers comprising one or more mismatched bases at the 3′ end or comprising one or more nucleotide analogs and a blocking group at the 3′ end under conditions that interfere with polymerase extension or ligation during said reaction of target-specific primer or probes hybridized in a base-specific manner to wildtype sequence or bisulfite-converted unmethylated sequence or complement sequence thereof.

[0273] In certain embodiment, the one or more assays to detect and distinguish the plurality of disease-specific and/or cell/tissue-specific DNA, RNA, or protein markers comprise one or more of the following: a quantitative real-time PCR method (qPCR); a reverse transcriptase-polymerase chain reaction (RTPCR) method; a bisulfite qPCR method; a digital PCR method (dPCR); a bisulfite dPCR method; a ligation detection method, a ligase chain reaction, a restriction endonuclease cleavage method; a DNA or RNA nuclease cleavage method; a micro-array hybridization method; a peptide-array binding method; an antibody-array method; a mass spectrometry method; a liquid chromatography-tandem mass spectrometry (LC-MS/MS) method; a capillary or gel electrophoresis method; a chemiluminescence method; a fluorescence method; a DNA sequencing method; a bisulfite conversion-DNA sequencing method; an RNA sequencing method; a proximity ligation method; a proximity PCR method; a method comprising immobilizing an antibody-target complex; a method comprising immobilizing an aptamer-target complex; an immunoassay method; a method comprising a Western blot assay; a method comprising an enzyme linked immunosorbent assay (ELISA); a method comprising a high-throughput microarray-based enzyme-linked immunosorbent assay (ELISA); or a method comprising a high-throughput flow-cytometry-based enzyme-linked immunosorbent assay (ELISA).

[0274] In certain embodiments, the one or more cutoff levels of the one or more assays to detect and distinguish the plurality of disease-specific and/or cell/tissue-specific DNA, RNA, or protein markers comprise one or more of the following calculations, comparisons, or determinations, in the one or more marker assays comparing samples from the disease vs. normal individual: marker ΔCt value is >2; marker ΔCt value is >4; ratio of detected marker-specific signal is >1.5; ratio of detected marker-specific signal is >3; ratio of marker concentrations is >1.5; ratio of marker concentrations is >3; enumerated marker-specific signals differ by >20%; enumerated marker-specific signals differ by >50%; marker-specific signal from a given disease sample is >85%; >90%; >95%; >96%; >97%; or >98% of the same marker-specific signals from a set of normal samples; or marker-specific signal from a given disease sample has a z-score of >1.03; >1.28; >1.65; >1.75; >1.88; or >2.05 compared to the same marker-specific signals from a set of normal samples.

[0275] Another aspect of the present application relates to a two-step method of diagnosing or prognosing a disease state of cells or tissue based on identifying the presence or level of a plurality of disease-specific and/or cell/tissue-specific DNA, RNA, and/or protein markers in a biological sample of an individual. The method involves obtaining a biological sample, the biological sample including exosomes, tumor-associated vesicles, markers within other protected states, cell-free DNA, RNA, and/or protein originating from the cells or tissue and from one or more other tissues or cells, wherein the biological sample is selected from the group consisting of cells, serum, blood, plasma, amniotic fluid, sputum, urine, bodily fluids, bodily secretions, and bodily excretions, or fractions thereof. A first step is applied to the biological samples with an overall sensitivity of >80% and an overall specificity of >90% or an overall Z-score of >1.28 to identify individuals more likely to be diagnosed or prognosed with the disease state. A second step is then applied to biological samples from those individuals identified in the first step with an overall specificity of >95% or an overall Z-score of >1.65 to diagnose or prognose individuals with the disease state. The first step and the second step are carried out using a method of the present application. The first step uses markers to cover many cancers, where the aim is to obtain high sensitivity for early cancers where the number of marker molecules in the blood may be limited. The second step then would score for additional markers to verify that the initial result was a true positive, as well as to identify the likely tissue of origin. The second step may include the methods described herein, and/or additional methods such as next-generation sequencing.

[0276] Fluorescent Labeling.

[0277] Consider an instrument that can detect 5 fluorescent signals, F1, F2, F3, F4, and F5, respectively. As an example, in the case of colon cancer, the highest frequency mutations will be found for K-ras, p53, APC and BRAF. Mutations in these four genes could be detected with a single fluorescent signal; F1, F2, F3, F4. If the scale is 1000 FU, then primer would be added using ratios of labeled and unlabeled UniTaq primers, such that amplification of LDR products on mutant target of these genes yields about 300 FU at the plateau. For the controls, the F5 would be calibrated to give a signal of 100 FU for a 1:1,000 dilution quantification control, and an additional 300 FU for ligation of mutant probe on wild-type control (should give no or low background signal).

[0278] For the other genes commonly mutated in colon cancer as shown below, (or even lower abundance mutations in the p53 gene) the following coding system may be used: Two fluorescent signals in equimolar amount at the 5′ end of the same UniTaq, with unlabeled primer titrated in, such that both fluorescent signals plateau at 100 FU. If fluorescent signals are F1, F2, F3, F4, then that gives the ability to detect mutations in 4 genes using a single fluorescent signal, and in mutations in 6 genes using combinations of fluorescent signal:

| | |
|---|---|
| Gene 1 = F1 (300 FU) | (p53, Hot Spots) |
| Gene 2 = F2 (300 FU) | (KRAS) |
| Gene 3 = F3 (300 FU) | (APC) |
| Gene 4 = F4 (300 FU) | (BRAF) |
| Gene 5 = F1 (100 FU), F2 (100 FU) | (PIK3CA) |
| Gene 6 = F1 (100 FU), F3 (100 FU) | (FBXW7) |
| Gene 7 = F1 (100 FU), F4 (100 FU) | (SMAD4) |
| Gene 8 = F2 (100 FU), F3 (100 FU) | (p53, additional) |
| Gene 9 = F2 (100 FU), F4 (100 FU) | (CTNNB1) |
| Gene 10 = F3 (100 FU), F4 (100 FU) | (NRAS) |

[0279] Suppose there is a second mutation, combined with a mutation in one of the top genes. This is easy to distinguish, since the top gene will always give more signal, independent if it is overlapping with the other fluorescent signals or not. For example, if the fluorescent signal is F1 100 FU, and F2 400 FU, that would correspond to mutations in Gene 2 and Gene 5.

[0280] If there are two mutations from the less commonly mutated genes (Gene 5-Gene 10) then the results will appear either as an overlap in fluorescent signals, i.e. F1 200 FU, F2 100 FU, F4 100 FU, or all 4 fluorescent signals. If the fluorescent signals are in the ratio of 2:1:1, then it is rather straightforward to figure out the 2 mutations: in the above example, F1 200 FU, F2 100 FU, F4 100 FU, would correspond to mutations in Gene 5 and Gene 7. A similar approach for multiplexing different colors has been described by the Kartalov group (Raj agopal et al., “Supercolor Coding Methods for Large-Scale Multiplexing of Biochemical Assays,” Anal. Chem. 85(16):7629-36 (2013); U.S. Patent Application Publication No. 20140213471A1, which are hereby incorporated by reference in their entirety).

[0281] More recently, digital droplet PCR (ddPCR) has been used to provide accurate quantification of the number of mutant or methylated molecules in a clinical sample. In general, amplification in a droplet implies at least a single molecule of the target was present in that droplet. Thus, when using a sufficient number of droplets that way exceed the number of initial targets, it is assumed that a given droplet only had a single molecule of the target. Thus, end-point PCR is often used to monitor the number of products.

[0282] Consider an instrument that can detect 5 fluorescent signals, F1, F2, F3, F4, and F5, respectively. Methylation in the promoter region of some genes often methylated in colon cancer could be used for the first four channels, for example F1=VIM, F2=SEPT9, F3=CLIP4, and F4=GSG1L. The last channel, F5 would be used as a control to assure a given droplet contained proper reagents, etc. Once again, combinations of fluorescent signal may be used to simultaneously detect methylation at 10 different promoter regions.

| | |
|---|---|
| Gene 1 = F1 | (VIM) |
| Gene 2 = F2 | (SEPT9) |
| Gene 3 = F3 | (CLIP4 |
| Gene 4 = F4 | (GSG1L) |
| Gene 5 = F1 + F2 | (PP1R16B) |
| Gene 6 = F1 + F3 | (KCNA3) |
| Gene 7 = F1 + F4 | (GDF6) |
| Gene 8 = F2 + F3 | (ZNF677) |
| Gene 9 = F2 + F4 | (CCNA1) |
| Gene 10 = F3 + F4 | (STK32B) |

[0283] For simplicity, consider how ddPCR may be used to accurately enumerate the number of original methylated molecules at 4 promoter regions using exPCR-ddPCR (see for example, FIGS. 4, 5, 6, 7, 8, 11, 12, 13, 14, 15, 18, 19, 20, 21 & 22). The approach also works using PCR-LDR-qPCR or exPCR-LDR-qPCR (see FIGS. 2, 3, 9, 10, 16 & 17). For this illustration, consider a total of 48 methylated regions are being detected, with 4 promoter regions in a single ddPCR reaction comprising 10,000 droplets or micro-pores or micro-wells. Consider a sample with 2, 4, 5, and 1 molecule(s) of methylated promoter regions for VIM, SEPT9, CLIP4, and GSG1L, respectively. Assume the initial one-sided primer extension with blocking primer has an efficiency of 50%, so after 20 cycles, there are=20; 40; 50; and 10 extension products of methylated promoter regions for VIM, SEPT9, CLIP4, and GSG1L, respectively. Also, with blocking primer for the top strand, again, assuming a general efficiency of 50%, after 10 cycles of PCR, there are (1.5 to the 10^{th}=57×number of initial extension products)=1,140; 2,280; 2,850; and 570 copies of the PCR products for methylated VIM, SEPT9, CLIP4, and GSG1L respectively. When such products are then diluted into 12 ddPCR reactions, on average, a given chamber will comprise of 95; 190; 237; and 48 copies of the PCR products for methylated VIM, SEPT9, CLIP4, and GSG1L, respectively. This is a total of about 570 of molecules that would be amplified with primers for the total PCR products for methylated VIM, SEPT9, CLIP4, and GSG1L. If the ddPCR comprises 10,000 droplets or micro-pores or micro-wells, on average, only 1 in 20 will actually comprise a PCR reaction; the chances of a given droplet having two amplicons that would compete with each other for resources would be about 1 in 400, or about 25 droplets would comprise 2 amplicons, which would be only 5% of the total number of droplets with only a single amplicon. Since there are 6 combinations of 2 different amplicons, on average, less than 2% of the droplets would contain two amplicons. In other words, the rare droplet comprising 2 or 3 or 4 colors would not need to be de-convoluted, they could simply be ignored as they represent approximately 4-6 droplets compared to about 48 droplets arising from a single molecule in the original sample. While it may be a bit difficult to distinguish 190 from 237 droplets, i.e. starting with 4 or 5 molecules of a given methylated target, it should be relatively straightforward to distinguish 95; 190; and 48 copies, corresponding to 2, 4, and 1 target molecules in the original sample.

[0284] For distinguishing and enumerating 10 methylation markers simultaneously in a single ddPCR reaction, consider a total of 50 methylated regions are being detected, with 10 promoter regions in a single ddPCR reaction comprising 10,000 droplets or micro-pores or micro-wells. Consider a sample with 2, 4, 5, 1, 0, 1, 3, 2, 0, and 1 molecule(s) of methylated promoter regions for VIM, SEPT9, CLIP4, GSG1L, PP1R16B, KCNA3, GDF6, ZNF677, CCNA1, and STK32B, respectively. Assume the initial one-sided primer extension with blocking primer has an efficiency of 50%, so after 20 cycles, there are=20; 40; 50; 10; 0; 10; 30; 20; 0; and 10 extension products of methylated promoter regions for VIM, SEPT9, CLIP4, GSG1L, PP1R16B, KCNA3, GDF6, ZNF677, CCNA1, and STK32B, respectively. Also, with blocking primer for the top strand, again, assuming a general efficiency of 50%, after 6 cycles of PCR, there are (1.5 to the 6^{th}=11×number of initial extension products)=220; 440; 550; 110; 0; 110; 330; 220; 0; and 110 copies of the PCR products for methylated VIM, SEPT9, CLIP4, GSG1L, PP1R16B, KCNA3, GDF6, ZNF677, CCNA1, and STK32B, respectively. When such products are then diluted into 5 ddPCR reactions, on average, a given chamber will comprise of 44; 88; 110; 22; 0; 22; 66; 44; 0; and 22 copies of the PCR products for methylated VIM, SEPT9, CLIP4, GSG1L, PP1R16B, KCNA3, GDF6, ZNF677, CCNA1, and STK32B, respectively. This is a total of about 418 of molecules that would be amplified with primers for the total PCR products for methylated VIM, SEPT9, CLIP4, GSG1L, PP1R16B, KCNA3, GDF6, ZNF677, CCNA1, and STK32B. If the ddPCR comprises 10,000 droplets or micro-pores or micro-wells, on average, only 1 in 25 will actually comprise a PCR reaction; the chances of a given droplet having two amplicons that would compete with each other for resources would be about 1 in 625, or about 16 droplets would comprise 2 amplicons, which would be only 4% of the total number of droplets with only a single amplicon. Since there are 45 combinations of 2 different amplicons, on average, less than 0.1% of the droplets would contain a given two amplicons. In other words, the rare droplet comprising 2 or 3 or 4 colors would not need to be de-convoluted, they could simply be ignored as they represent one or two droplets compared to about 22 droplets arising from a single molecule in the original sample. While it may be a bit difficult to distinguish 88 from 110 droplets, i.e. starting with 4 or 5 molecules of a given methylated target, it should be relatively straightforward to distinguish 44, 88, and 22 copies, corresponding to 2, 4, and 1 target molecules in the original sample.

[0285] The above approach would also work for accurately enumerating mRNA, miRNA, ncRNA, or lncRNA target molecules. Instead of aliquoting the sample as described in step B of FIGS. 23-32, the sample is used directly for subsequent ddPCR enumeration. For distinguishing and enumerating 10 mRNA, ncRNA, or lncRNA markers simultaneously in a single ddPCR reaction, consider a total of 50 mRNA, ncRNA, or lncRNA regions are being detected in a single ddPCR reaction comprising 10,000 droplets or micro-pores or micro-wells. Once again, combinations of fluorescent signal may be used to simultaneously detect 10 mRNA or lncRNA markers.

| | |
|---|---|
| Gene 1 = F1 | (mRNA1) |
| Gene 2 = F2 | (mRNA2) |
| Gene 3 = F3 | (mRNA3) |
| Gene 4 = F4 | (mRNA4) |
| Gene 5 = F1 + F2 | (ncRNA5) |
| Gene 6 = F1 + F3 | (ncRNA6) |
| Gene 7 = F1 + F4 | (ncRNA7) |
| Gene 8 = F2 + F3 | (ncRNA8) |
| Gene 9 = F2 + F4 | (ncRNA9) |
| Gene 10 = F3 + F4 | (ncRNA10) |

[0286] Consider a sample with 2, 4, 15, 1, 0, 10, 3, 20, 0, and 1 molecule(s) of mRNA1-4 and ncRNA5-10, respectively, using essentially the RT-PCR-PCR-qPCR example illustrated in FIG. 28. Six cycles of RT-PCR will generate 64 cDNA copies of each transcript generating=128; 256; 960; 64; 0; 640; 192; 1280; 0; and 64 copies of mRNA1-4 and ncRNA5-10, respectively. When such products are then diluted into 5 ddPCR reactions, on average, a given chamber will comprise of 25; 51; 192; 13; 0; 128; 28; 256; 0; and 13 copies of the PCR products for mRNA1-4 and ncRNA5-10, respectively. This is a total of about 706 of molecules that would be amplified with primers for the total PCR products for methylated mRNA1-4 and ncRNA5-10. If the ddPCR comprises 10,000 droplets or micro-pores or micro-wells, on average, only 1 in 14 will actually comprise a PCR reaction. The two most common RNA's in this example; mRNA 3 and ncRNA5 would be present on average of 1 in 52 and 1 in 39, thus the chances of a given droplet having these two amplicons that would compete with each other for resources would be about 1 in 2028, or about 5 droplets would comprise 2 amplicons, which is still less than for a single molecule after amplification—which will generate 13 copies. In other words, the rare droplet comprising 2 or 3 or 4 colors would not need to be de-convoluted, they could simply be ignored as they represent from 1 to 5 droplets compared to at least 13 droplets arising from a single molecule in the original sample. If some RNA molecules are present in higher amounts, one can still de-convolute multiple signals arising from 2 amplicons in a given droplet, using the same approach of different color probes at different levels of FU (i.e. 300 FU for products with a single color; 100 FU each for products using 2 colors) as articulated earlier.

[0287] Another aspect of the present application relates to the ability to distinguish cancer at the earliest stages when analyzing markers within a blood sample. The average body contains about 6 liters (6,000 ml) of blood. A 10 ml sample will then comprise 1/600th of the sample. While some cancers (i.e. lung cancer, melanoma) have a high mutational load, other cancers (i.e. breast, ovarian) have few mutations, and even fewer at the earliest stages. In contrast, methylation changes in promoter regions (i.e. methylation markers) appear to be early events. For the purposes of the calculations below, assume that if a marker is present in the sample, it can be detected down to the single molecule level, independent of the technology that is being used to identify the marker.

[0288] On a practical level, different cancers have different frequencies for different mutational markers. For example, the mutation rate for gene K-ras is ˜30% and >90% for colorectal cancer and pancreatic cancer, respectively. While p53 is found mutated in about 50% of all cancers, more often than not, such a mutation is manifested in late-stage tumors. As a benchmark, a given cancer during its earliest stage, generates at least one detectable mutation. Suppose that at any given time, there are 200 mutated molecules circulating in the plasma of the patient. Given the total volume, if there is a 10 ml sample, taken, then there is about a ⅓^{rd} chance that the sample will contain at least 1 mutated molecule. A more accurate prediction would be based on the Poisson distribution. If there are 200 objects (i.e. mutated molecules) distributed into 600 bins (i.e. 600 aliquots of 10 ml representing the total blood volume of a patient), Poisson calculation would indicate that: 72% of wells will have 0 objects, 23.7% will have 1 object, 3.9% will have 2 objects, 0.4% will have 3 objects, etc. In other words, 28.1% of the aliquots would have at least one mutated molecule. If the assay is capable of detecting every single mutated molecule, then its sensitivity would be 28.1%. Likewise, if there were 300 objects (i.e. mutated molecules) distributed into 600 bins (i.e. 600 aliquots of 10 ml), then: 61% of wells will have 0 objects, 30.3% will have 1 object, 7.6% will have 2 objects, 1.3% will have 3 objects, etc. In other words, 39.4% of the aliquots would have at least one mutated molecule. If the assay is capable of detecting every single mutated molecule, its sensitivity is at 39.4%. Likewise, if there were 400 objects (i.e. mutated molecules) distributed into 600 bins (i.e. 600 aliquots of 10 ml), then: 51% of wells will have 0 objects, 34.3% will have 1 object, 11.5% will have 2 objects, 2.5% will have 3 objects, etc. In other words, 49% of the aliquots would have at least one mutated molecule. If the assay detects every single mutated molecule, its sensitivity would be 49%. Likewise, if there were 600 objects (i.e. mutated molecules) distributed into 600 bins (i.e. 600 aliquots of 10 ml), then the Poisson calculation would be: 36.8% of wells will have 0 objects, 36.8% will have 1 object, 18.3% will have 2 objects, 6.1% will have 3 objects, etc. In other words, 63.2% of the aliquots would have at least one mutated molecule. If the assay detects every single mutated molecule, then its sensitivity will be 63.2%. Nevertheless, on a practical level, even with a detectable marker load as high as 600 molecules, the assay would still miss 36.8% of early cancers for that type of tumor. Recent literature results have argued what constitutes “early cancer”, with some groups claiming stage I & II cancers are early cancer, while others claiming that stages I, II, and III cancers are early cancer, both the definition and type varies, but general when scoring form mutations the results have reported sensitivities ranging from around 20% to around 70%—which translates into missing 30% to 80% of early cancers (Klein et al., “Development of a Comprehensive Cell-free DNA (cfDNA) Assay for Early Detection of Multiple Tumor Types: The Circulating Cell-free Genome Atlas (CCGA) Study,” Journal of Clinical Oncology 36(15):12021-12021 (2018); Liu et al., “Breast Cancer Cell-free DNA (cfDNA) Profiles Reflect Underlying Tumor Biology: The Circulating Cell-free Genome Atlas (CCGA) Study,” Journal of Clinical Oncology 36(15):536-536 (2018), which are hereby incorporated by reference in their entirety).

[0289] The above calculations are performed based on the assumption that detecting even a single mutation is sufficient to call a patient positive. Initial work identifying mutations in the blood from patients with metastatic disease revealed an average of 5 mutations not only in the patients, but also in age-matched controls (Razavi, et al., “Cell-free DNA (cfDNA) Mutations From Clonal Hematopoiesis: Implications for Interpretation of Liquid Biopsy Tests,” Journal of Clinical Oncology 35(15): 11526-11526 (2017), which is hereby incorporated by reference in its entirety). This phenomenon, known as clonal hematopoiesis, results from accumulation of mutations in white-blood cells, that then undergo clonal expansion. Once the presence of such mutations are accounted for (by sequencing an aliquot of WBC DNA from the same individual), the accuracy or specificity of these tests has been set at 98%. For some cancers like ovarian cancer, which exhibit low mutation load, an estimated 60% of the disease at its early stage would be missed. To put these number in perspective, there were 20,240 new cases of ovarian cancer in the U.S. in 2018. Thus, about 55 million women (over the age of 50) should be tested for the disease. Such test would identify 8,096 women with ovarian cancer. However, there would be about 1.1 million false-positives. The positive predictive value of such a test would be around 0.74%. In other words, only one in 136 women who tested positive would actually have ovarian cancer, the rest would be false-positives.

[0290] For a multi-marker test of the present application, two or more markers need to be deemed positive in order the overall screening result to be deemed positive. By increasing the total number of individual markers used, as well as the number of markers required to call the overall screening test positive, both sensitivity and specificity for detecting early cancer may be improved. The overall early cancer detection sensitivity is a function of the average number of each marker in the blood, the average number of markers positive, the minimum number of markers required to call the sample positive, and the total number of markers scored. For example, if the test uses 12 methylation markers, that on average are methylated in >50% of tumors for that cancer type, then on average, about 6 markers will be methylated for a given sample. If on average there are 600 methylated molecules in the blood for each marker, then on average a total of 600×600=3,600 objects (i.e. methylated molecules) are distributed into 600 bins (i.e. 600 aliquots of 10 ml). As an approximate calculation based on the Poisson calculation, the distribution would be: 0.2% of wells will have 0 objects, 1.5% will have 1 object, 4.5% will have 2 objects, 8.9% will have 3 objects, 13.3% will have 4 objects, 16.0% will have 5 objects, 16.0% will have 6 objects, 13.8% will have 7 objects, 10.3% will have 8 objects etc. Suppose that at least two markers need to be called positive. In this case, 1.7% (=0.2%+1.5%) of the aliquots with either 0 or 1 object (i.e. methylation markers) would be called negative. Thus, if a minimum of two markers are required to call the sample positive, then the sensitivity of the assay would be 100%−1.7%=98.3% sensitivity. Suppose that at least three markers need to be called positive. In this case, aliquots with either 0, 1 or 2 objects (i.e. methylation markers) would be called negative=0.2%+1.5%+4.5%=6.2%. Thus, if a minimum of two markers are required to call the sample positive, then the sensitivity of the assay would be 100%−6.2%=93.8% sensitivity. It is understood that a small fraction of aliquots with 3 markers positive will contain 2 molecules of one marker, and one molecule of a second marker, and thus not contain the minimum of three different markers positive, nevertheless, this is a small deviation from the approximate calculation above.

[0291] The overall early cancer detection specificity is a function of the average number of markers positive, the false-positive rate for each individual marker, the minimum number of markers required to call the sample positive, and the total number of markers scored. To estimate the overall false-positive rate, a formula is used based on the probability of binning different color socks into a number of drawers. Consider the percentage of false positives for each marker=“% FP”; the total number of markers “m”, and the minimum number of markers required to call the sample positive “n”. Then the formula for calculating overall false positive would be: (% FP)ⁿ×[m!/(m−n)!n!]. Suppose that percentage of false positives for each marker=“% FP” is at 4%; the total number of markers “m” is 12, and the minimum number of markers required to call the sample positive “n” is 3. Then the above formula for overall false-positives would be (4%)³×[12!/9!3!]=(4%)³×[12×11×10/6]=1.4%. Thus, the overall specificity would be [100%−1.4%]=98.6%. The actual individual false-positive rate may differ for different markers. Further, it may depend on the source of the false-positive signal. If for example, age-related methylation is due to clonal hematopoiesis, i.e. results from accumulation of methylations in white-blood cells, that then undergo clonal expansion. This type of false-positive may be mitigated by also scoring for methylation changes in white blood cells from the same patient. On the other hand, if the source of the false-positive signal is due to release of DNA into the plasma due to tissue inflammation, or for example breakdown of muscle tissue from weight-lifting, then mitigating that signal may require sampling the blood at a different time when the body is rested, or a month later when inflammation has subsided.

[0292] FIGS. 33, 34, 35, and 36 illustrate results for calculated overall Sensitivity and Specificity for 24, 36, 48, and 96 markers, respectively. These graphs are based on the assumption that the average individual marker sensitivity is 50%, and the average individual marker false-positive rate is from 2% to 5%. The sensitivity curves provide overall sensitivity as a function of the average number of molecules in the blood for each marker, with separate curves for each minimum number of markers needed to call a sample as positive. The specificity curves provide overall specificity as a function of individual marker false-positive rates, again with separate curves for each minimum number of markers needed to call a sample as positive. The calculated numbers for overall Sensitivity and Specificity for 12, 24, 36, 48, 72 and 96 markers, respectively are provided in the tables below.

TABLE 1
12 Markers Sensitivity;
Avg. Indiv. Mkr,: 50% Sensitivity

| Average | | | |
|---|---|---|---|
| Number of | | 12 markers, | 12 markers, |
| Molecules in | Mutation, 1 | Minimum 2 | Minimum 3 |
| Blood | Positive | Positive | Positive |
| 150 | 22.1% | 44.2% | 19.1% |
| 200 | 28.1% | 59.4% | 32.3% |
| 240 | 33.0% | 69.2% | 43.0% |
| 300 | 39.4% | 80.1% | 57.7% |
| 400 | 48.8% | 90.8% | 76.2% |
| 480 | 55.1% | 95.2% | 85.7% |
| 600 | 63.2% | 98.3% | 93.8% |

TABLE 2
12 Marker Specificity

| Individual | Minimum 2 | Minimum 3 |
|---|---|---|
| marker FP | Markers | Markers |
| rate | Positive | Positive |
| 2% | 97.4% | 99.9% |
| 3% | 94.1% | 99.5% |
| 4% | 89.4% | 98.6% |
| 5% | | 97.2% |

TABLE 3
24 Markers Sensitivity;
Avg. Indiv. Mkr,: 50% Sensitivity

| Average | | | | |
|---|---|---|---|---|
| Number of | | 24 markers, | 24 markers, | 24 markers, |
| Molecules in | Mutation, 1 | Minimum 3 | Minimum 4 | Minimum 5 |
| Blood | Positive | Positive | Positive | Positive |
| 150 | 22.1% | 57.7% | 35.3% | 18.5% |
| 200 | 28.1% | 76.2% | 56.7% | 37.1% |
| 240 | 33.0% | 85.7% | 70.6% | 52.4% |
| 300 | 39.4% | 93.8% | 84.9% | 71.5% |
| 400 | 48.8% | 98.6% | 95.8% | 90.0% |
| 480 | 55.1% | 99.6% | 98.6% | 96.2% |
| 600 | 63.2% | 99.9% | 99.8% | 99.2% |

TABLE 4
24 Marker Specificity

| Individual | Minimum 3 | Minimum 4 | Minimum 5 |
|---|---|---|---|
| marker FP | Markers | Markers | Markers |
| rate | Positive | Positive | Positive |
| 2% | 98.4% | 99.8% | 99.9% |
| 3% | 94.6% | 99.1% | 99.9% |
| 4% | 87.1% | 97.3% | 99.6% |
| 5% | | 93.4% | 98.7% |

TABLE 5
36 Marker Sensitivity;
Avg. Indiv. Mkr,: 50% Sensitivity

| Average | | | | | |
|---|---|---|---|---|---|
| Number of | | 36 markers, | 36 markers, | 36 markers, | 36 markers, |
| Molecules in | Mutation, 1 | Minimum 3 | Minimum 4 | Minimum 5 | Minimum 6 |
| Blood | Positive | Positive | Positive | Positive | Positive |
| 150 | 22.1% | 82.6% | 65.8% | 46.8% | 29.7% |
| 200 | 28.1% | 93.8% | 84.9% | 71.5% | 55.4% |
| 240 | 33.0% | 97.5% | 92.8% | 84.4% | 72.4% |
| 300 | 39.4% | 99.4% | 97.9% | 94.5% | 88.4% |
| 400 | 48.8% | 99.9% | 99.8% | 99.2% | 98.0% |
| 480 | 55.1% | 100.0% | 100.0% | 99.9% | 99.6% |
| 600 | 63.2% | 100.0% | 100.0% | 100.0% | 100.0% |

TABLE 6
36 Marker Specificity

| Individual | Minimum 3 | Minimum 4 | Minimum 5 | Minimum 6 |
|---|---|---|---|---|
| marker FP | Markers | Markers | Markers | Markers |
| rate | Positive | Positive | Positive | Positive |
| 2% | 94.3% | 99.1% | 99.9% | 100.0% |
| 3% | 80.7% | 95.2% | 99.1% | 99.9% |
| 4% | | 84.9% | 96.1% | 99.2% |
| 5% | | | 88.2% | 97.0% |

TABLE 7
48 Marker Sensitivity;
Avg. Indiv. Mkr,: 50% Sensitivity

| Average | | | | | | |
|---|---|---|---|---|---|---|
| Number of | | 48 markers, | 48 markers, | 48 markers, | 48 markers, | 48 markers, |
| Molecules | Mutation, 1 | Minimum 4 | Minimum 5 | Minimum 6 | Minimum 7 | Minimum 8 |
| in Blood | Positive | Positive | Positive | Positive | Positive | Positive |
| 150 | 22.1% | 84.9% | 71.6% | 55.6% | 39.6% | 25.8% |
| 200 | 28.1% | 95.8% | 90.1% | 80.9% | 68.7% | 54.8% |
| 240 | 33.0% | 99.1% | 97.2% | 93.4% | 87.1% | 78.1% |
| 300 | 39.4% | 99.8% | 99.3% | 98.1% | 95.6% | 92.3% |
| 400 | 48.8% | 99.9% | 99.9% | 99.8% | 99.7% | 99.1% |
| 480 | 55.1% | 99.9% | 99.9% | 99.9% | 99.9% | 99.9% |
| 600 | 63.2% | 99.9% | 99.9% | 99.9% | 99.9% | 99.9% |

TABLE 8
48 Marker Specificity

| Individual | Minimum 4 | Minimum 5 | Minimum 6 | Minimum 7 | Minimum 8 |
|---|---|---|---|---|---|
| marker FP | Markers | Markers | Markers | Markers | Markers |
| rate | Positive | Positive | Positive | Positive | Positive |
| 2% | 96.9% | 99.4% | 99.9% | 99.9% | 99.9% |
| 3% | 84.3% | 95.8% | 99.1% | 99.8% | 99.9% |
| 4% | | 82.5% | 95.0% | 98.8% | 99.8% |
| 5% | | | | 94.3% | 98.6% |

TABLE 9
72 Marker Sensitivity;
Avg. Indiv. Mkr,: 50% Sensitivity

| Average | | | | | | | | |
|---|---|---|---|---|---|---|---|---|
| Number of | | 72 markers, | 72 markers, | 72 markers, | 72 markers, | 72 markers, | 72 markers, | 72 markers, |
| Molecules | Mutation, 1 | Minimum 6 | Minimum 7 | Minimum 8 | Minimum 9 | Minimum 10 | Minimum 11 | Minimum 12 |
| in Blood | Positive | Positive | Positive | Positive | Positive | Positive | Positive | Positive |
| 150 | 22.1% | 88.4% | 79.3% | 67.6% | 54.4% | 41.3% | 29.4% | 19.7% |
| 200 | 28.1% | 98.0% | 95.4% | 91.0% | 84.5% | 75.8% | 65.3% | 53.8% |
| 240 | 33.0% | 99.6% | 98.9% | 97.5% | 94.9% | 90.8% | 84.9% | 77.2% |
| 300 | 39.4% | 99.9% | 99.9% | 99.7% | 99.3% | 98.5% | 97.0% | 94.5% |
| 400 | 48.8% | 99.9% | 99.9% | 99.9% | 99.9% | 99.9% | 99.9% | 99.7% |
| 480 | 55.1% | 99.9% | 99.9% | 99.9% | 99.9% | 99.9% | 99.9% | 99.9% |
| 600 | 63.2% | 99.9% | 99.9% | 99.9% | 99.9% | 99.9% | 99.9% | 99.9% |

TABLE 10
72 Marker Specificity

| Individual | Minimum | Minimum | Minimum | Minimum | Minimum | Minimum | Minimum |
|---|---|---|---|---|---|---|---|
| marker | 6 Markers | 7 Markers | 8 Markers | 9 Markers | 10 Markers | 11 Markers | 12 Markers |
| FP rate | Positive | Positive | Positive | Positive | Positive | Positive | Positive |
| 2% | 99.0% | 99.8% | 100.0% | 100.0% | 100.0% | 100.0% | 100.0% |
| 3% | 88.6% | 96.8% | 99.2% | 99.8% | 100.0% | 100.0% | 100.0% |
| 4% | | | 92.2% | 97.8% | 99.4% | 99.9% | 100.0% |
| 5% | | | | 83.4% | 94.8% | 98.5% | 99.6% |

TABLE 11
96 Marker Sensitivity;
Avg. Indiv. Mkr,: 50% Sensitivity

| Average | | | | | | | | |
|---|---|---|---|---|---|---|---|---|
| Number of | | 96 markers, | 96 markers, | 96 markers, | 96 markers, | 96 markers, | 96 markers, | 96 markers, |
| Molecules | Mutation, 1 | Minimum 7 | Minimum 8 | Minimum 9 | Minimum 10 | Minimum 11 | Minimum 12 | Minimum 13 |
| in Blood | Positive | Positive | Positive | Positive | Positive | Positive | Positive | Positive |
| 150 | 22.1% | 95.4% | 91.0% | 84.5% | 75.8% | 65.3% | 53.8% | 42.4% |
| 200 | 28.1% | 99.6% | 99.0% | 97.8% | 95.7% | 92.3% | 87.3% | 80.7% |
| 240 | 33.0% | 99.9% | 99.9% | 99.7% | 99.2% | 98.3% | 96.8% | 94.4% |
| 300 | 39.4% | 99.9% | 99.9% | 99.9% | 99.9% | 99.9% | 99.7% | 99.5% |
| 400 | 48.8% | 99.9% | 99.9% | 99.9% | 99.9% | 99.9% | 99.9% | 99.9% |
| 480 | 55.1% | 99.9% | 99.9% | 99.9% | 99.9% | 99.9% | 99.9% | 99.9% |
| 600 | 63.2% | 99.9% | 99.9% | 99.9% | 99.9% | 99.9% | 99.9% | 99.9% |

TABLE 12
96 Marker Specificity

| Individual | Minimum | Minimum | Minimum | Minimum | Minimum | Minimum | Minimum |
|---|---|---|---|---|---|---|---|
| marker | 7 Markers | 8 Markers | 9 Markers | 10 Markers | 11 Markers | 12 Markers | 13 Markers |
| FP rate | Positive | Positive | Positive | Positive | Positive | Positive | Positive |
| 2% | 98.5% | 99.7% | 99.9% | 100.0% | 100.0% | 100.0% | 100.0% |
| 3% | | 91.3% | 97.4% | 99.3% | 99.8% | 100.0% | 100.0% |
| 4% | | | | 88.2% | 96.3% | 99.0% | 99.7% |
| 5% | | | | | | 84.7% | 95.1% |

[0293] From the above tables, the receiver operating characteristic (ROC) curves may be calculated by plotting Sensitivity vs. 1-Specificity. Since these are theoretical calculations, the curves were generated for different levels of average marker false-positive rates of 2%, 3%, 4%, and 5%. To assist in visualizing the graphs and calculating the AUC (Area under curve), the edges were set at 100% and 0%, respectively. The ROC curves for 24 marker, 3% & 4% average marker false-positives, 36 marker, 3% & 4% average marker false-positives, and 48 marker, 2%, 3%, 4% & 5% average marker false-positives are provided in Table 13 below and for 48 Markers illustrated in FIGS. 37 and 38, respectively. Generally, the closer the AUC is to 1, the more accurate the test−values of >95% are desirable, and values >99% are superb. Using the benchmark of an average of 300 molecules in the blood for early cancer (Stage I & II), AUC values are at 95% with 24 markers, improve to 99% with 36 markers, and range from 98% to >99% with 48 markers, depending on average marker false-positive values. These graphs provide an illustration of the power of multiple marker assays for achieving good sensitivities and specificities.

TABLE 13
24, 36, & 48 Marker AUC Values from ROC Curves;
Avg. Indiv. Mkr,: 50% Sensitivity

| Total | | | | | | | |
|---|---|---|---|---|---|---|---|
| Markers: | | | | | | | |
| Individual | | | | | | | |
| marker | 150 | 200 | 240 | 300 | 400 | 480 | 600 |
| FP rate | Molecules | Molecules | Molecules | Molecules | Molecules | Molecules | Molecules |
| 24 Mkrs: 3% | 77% | 87% | | 96% | 99% | >99% | >99% |
| 24 Mkrs: 4% | 74% | 85% | | 95% | 99% | >99% | >99% |
| 36 Mkrs: 3% | 87% | 95% | 98% | 99% | >99% | >99% | >99% |
| 36 Mkrs: 4% | 78% | 89% | 95% | 98% | 99% | >99% | >99% |
| 48 Mkrs: 2% | 92% | 98% | 99% | >99% | >99% | >99% | >99% |
| 48 Mkrs: 3% | 89% | 97% | 99% | >99% | >99% | >99% | >99% |
| 48 Mkrs: 4% | 81% | 93% | 98% | 99% | >99% | >99% | >99% |
| 48 Mkrs: 5% | 71% | 86% | 94% | 98% | 99% | 99% | 99% |

[0294] How would the above markers work in a one-step cancer assay? To illustrate the challenges of developing an early cancer detection screen, consider the challenge of screening 107 million adults in the U.S. over the age of 50 for colorectal cancer—of which there are about 135,000 new cases that are diagnosed a year. In this example, if there is an average of 300 molecules in the blood for early cancer (Stage I & II), and taking the best-case scenario of individual marker FP rate is 2%, then if there is a 3-marker minimum, then overall FP rate is 1.6% for 24 markers, for a specificity of 98.4% (See FIG. 33B). At 3 markers, for Stage I & II cancer (at about 300 molecules of each positive marker in the blood), the test would miss 6.2%; i.e. for Stage I & II cancer the overall sensitivity would be 93.8% (See FIG. 33A), e.g. the test would correctly identify 93.8% of individuals with disease, which would be 126,630 individuals (out of 135,000 new cases). At a specificity of 98.4%, for 107 million individuals screened, the test would also generate 1.6%×107,000,000=1,712,000 false positives. Thus, the positive predictive value would be 126,630/(126,630+1,712,000)=around 6.8%, in other words, only one in 14 individuals who tested positive would actually have colorectal cancer, the rest would be false-positives.

[0295] However, if the individual marker FP rate is more realistic, say 4%, then more markers will be required to achieve better than 98% specificity, and this will be at the cost of sensitivity. If individual marker FP rate is 4%, then if there is a 5-marker minimum, then overall FP rate is 0.4% for 24 markers, for a specificity of 99.6% (See FIG. 33B). At 5 markers, for Stage I & II cancer (at about 300 molecules of each positive marker in the blood), the test would miss 28.5%; i.e. for Stage I & II cancer the overall sensitivity would be 71.5% (See FIG. 33A), e.g. the test would correctly identify 71.5% of individuals with disease, which would be 90,540 individuals (out of 135,000 new cases). At a specificity of 99.6%, for 107 million individuals screened, the test would also generate 0.4%×107,000,000=428,000 false positives. Thus, the positive predictive value would be 90,540/(90,540+428,000)=around 17.5%, in other words, only one in 5.7 individuals who tested positive would actually have colorectal cancer, the rest would be false-positives. A PPV of 17.5% is quite respectable, however, it would be achieved at the cost of missing 28.5% of early cancer.

[0296] Another aspect of the present application relates to a two-step method of diagnosing or prognosing a disease state of cells or tissue based on identifying the presence or level of a plurality of disease-specific and/or cell/tissue-specific DNA, RNA, and/or protein markers in a biological sample of an individual. The method involves obtaining a biological sample, the biological sample including exosomes, tumor-associated vesicles, markers within other protected states, cell-free DNA, RNA, and/or protein originating from the cells or tissue and from one or more other tissues or cells, wherein the biological sample is selected from the group consisting of cells, serum, blood, plasma, amniotic fluid, sputum, urine, bodily fluids, bodily secretions, and bodily excretions, or fractions thereof. A first step is applied to the biological samples with an overall sensitivity of >80% and an overall specificity of >85% or an overall Z-score of >1.03 to identify individuals more likely to be diagnosed or prognosed with the disease state. A second step is the applied to biological samples from those individuals identified in the first step with an overall specificity of >95% or an overall Z-score of >1.65 to diagnose or prognose individuals with the disease state. The first step and the second step are carried out using a method of the present application. The first step uses markers to cover many cancers, where the aim is to obtain high sensitivity for early cancers where the number of marker molecules in the blood may be limited. The second step then would score for additional markers to verify that the initial result was a true positive, as well as to identify the likely tissue of origin. The second step may include the methods described herein, and/or additional methods such as next-generation sequencing. The first step uses markers to cover many cancers, where the aim is to obtain high sensitivity for early cancers where the number of marker molecules in the blood may be limited. The second step then would score for additional markers to verify that the initial result was a true positive, as well as to identify the likely tissue of origin. The second step may include the methods described herein, and/or additional methods such as next-generation sequencing.

[0297] To illustrate one embodiment of how such a two-step cancer test may be designed, consider again the challenge of identifying patients with early colorectal cancer. In 2017, there were an estimated 95,520 new cases of colon cancer and 39,910 cases of rectal cancer diagnosed in the U.S.—for a total of about 135,000 new cases. Consider an initial test using 24 markers. In this example, if there is an average of 300 molecules in the blood for early cancer (Stage I & II), and if that would cover at least one mutation, then the sensitivity for identifying such a cancer by next generation sequencing would be 39.4% (See FIG. 33A). If the individual marker FP rate is 3%, then if there is a 3-marker minimum, then overall FP rate is 5.4% for 24 markers, for a specificity of 94.6% (See FIG. 33B). At 3 markers, for Stage I & II cancer (at about 300 molecules of each positive marker in the blood), the test would miss 6.2%; i.e. for Stage I & II cancer the overall sensitivity would be 93.8% (See FIG. 33A). Note that these levels of sensitivity and specificity are better than the current tests on the market. However, if the individual marker FP rate is 5%, then if there is a 4-marker minimum, then overall FP rate is 6.6% for 24 markers, for a specificity of 93.4% (See FIG. 33B). At 4 markers, for Stage I & II cancer (at about 300 molecules of each positive marker in the blood), the test would miss 15.1%; i.e. for Stage I & II cancer the sensitivity would be 84.9% (See FIG. 33A). These graphs illustrate a basic conflict of most diagnostic tests—improve the sensitivity of a test (i.e. less false-negatives), but sacrifice the test specificity (i.e. more false-positives), or improve the specificity of a test (less false-positives) at the risk of losing the test sensitivity (i.e. more false-negatives).

[0298] By using a two-step cancer test, the parameters may be adjusted to improve BOTH sensitivity and specificity. For example, the aforementioned 24 marker test, using 3 markers, for Stage I & II cancer (at about 300 molecules of each positive marker in the blood), the overall sensitivity would be 93.8%. Those samples that are scored as positives in the first step (24-markers specific to GI cancers)—including the false-positives would be retested in the second step with an expanded panel of 48 markers to provide coverage of colorectal cancers. If the individual marker FP rate is 3%, then if there is a 5-marker minimum, then overall FP rate is 4.2% for 48 markers, for a specificity of 95.8% (See FIG. 35B). At 5 markers, for Stage I & II cancer (at about 300 molecules of each positive marker in the blood), the test would miss 0.7%; i.e. for Stage I & 2 cancer the sensitivity would be 99.3% (See FIG. 35A). Technically, since the samples were already culled in the first step, the overall sensitivity is 93.8%×99.3%=93.1%. If the individual marker FP rate is 3%, then if there is a 6-marker minimum, then overall FP rate is <1% for 48 markers, for a specificity of 99.1% (See FIG. 35B). At 6 markers, for Stage I & II cancer (at about 300 molecules of each positive marker in the blood), the test would miss 1.9%; i.e. for Stage I & II cancer the sensitivity would be 98.1% (See FIG. 35A). Since the samples were already culled in the first step, the overall sensitivity is 93.8%×98.1%=92.0%. If the individual marker FP rate is 3%, then if there is a 7-marker minimum, then overall FP rate is <0.2% for 48 markers, for a specificity of 99.8% (See FIG. 35B). At 7 markers, for Stage I & II cancer (at about 300 molecules of each positive marker in the blood), the test would miss 4.4%; i.e. for Stage I & II cancer the sensitivity would be 95.6% (See FIG. 35A). Since the samples were already culled in the first step, the overall sensitivity is 93.8%×95.6%=89.7%.

[0299] Returning to the example of colorectal cancer, in particular the cases of microsatellite stable tumors (MSS) where the mutation load is low, for these calculations when relying on NGS sequencing alone (assuming 300 molecules with one mutation in the blood), an estimated 60% of early colorectal cancer would be missed. Again, to put these number in perspective, in the U.S., about 135,000 new cases of colorectal cancer are predicted in 2018. About 107 million individuals in the U.S. are over the age of 50 and should be tested for colorectal cancer. With the assumption of these samples containing at least 300 molecules with one mutation in the blood, such a test would find 54,000 men and women (out of 135,000 new cases) with colorectal cancer. However, with a specificity for sequencing at 98%, there would be about 2.1 million false-positives. The positive predictive value of such a test would be around 2.6%, in other words, only one in 39 individuals who tested positive would actually have colorectal cancer, the rest would be false-positives. In contrast, consider the two-step methylation marker test described above, wherein the first step has 24 methylation markers specific to GI cancers, while the second step has 48 methylation markers specific to colorectal cancer. In this example, as above, the calculations are done with the anticipation of an average of 300 methylated molecules per positive marker in the blood. Assuming individual marker false-positive rates of 3%, and with the first step requiring a minimum of 3 markers positive, then with an overall specificity of 94.6%, the first step would identify 5,778,000 individuals (out of 107,000,000 total adults over 50 in the U.S.) which would include at 93.8% sensitivity about 126,630 individuals with Stage I & II colorectal cancer (out of 135,000 total). However, those 5,778,000 presumptive positive individuals would be evaluated in the second step of 48 markers requiring a minimum of 6 markers positive, then the two-step test would identify 98.1%×93.8%=92.0%=124,200 individuals (out of 135,000 new cases) with colorectal cancer. With a specificity of 99.1%, the second test would also generate 5,778,000×0.9%=52,000 false-positives. The positive predictive value of such a test would be 124,200/176,200=70.5%, in other words, 2 in 3 individuals who tested positive would actually have colorectal cancer, an extraordinarily successful screen to focus on those patients who would most benefit from follow-up colonoscopy. The benefit in lives saved would be of incalculable value.

[0300] While the foregoing discussion has focused on methylation markers, with an average sensitivity of 50%, and individual marker false-positives ranging from 2%-5%, there are many other markers of cancer with varying sensitivities and specificities. In general, protein markers (with the exception of PSA and PSMA) have been of limited clinical utility for detection of early cancer because the false-positives are so high, resulting in very low positive predictive value. Cancer markers from bodily fluids (i.e. plasma, urine) include, but are not limited to plasma microRNAs (miRNA); mutations or methylation in cfDNA; exosomes with surface cancer-specific protein markers, or internal miRNA, ncRNA, lncRNA, mRNA, DNA; circulating cytokines, circulating proteins, or circulating antibodies against cancer-antigens; or nucleic-acid markers in whole blood (for review, see Nikolaou et al., “Systematic Review of Blood Diagnostic Markers in Colorectal Cancer,” Techniques in Coloproctology (2018), which is hereby incorporated by reference in its entirety). Several methods have been reported for detecting cancer-specific miRNAs in the serum or plasma of patients with colorectal (or others) cancers; these miRNAs include, but are not limited to: miR-1290; miR-21; miR-24; miR-320a; miR-423-5p; miR-29a; miR-125b; miR-17-3p; miR-92a; miR-19a; miR-19b; miR-15b; mir23a; miR-150; miR-223; miR-1229; miR-1246; miR-612; miR-1296; miR-933; miR-937; miR-1207; miR-31; miR-141; miR-224-3p; miR-576-5p; miR-885-5p; miR-200c; miR-203 (Imaoka et al., “Circulating MicroRNA-1290 as a Novel Diagnostic and Prognostic Biomarker in Human Colorectal Cancer,” Ann. Oncol. 27(10):1879-1886 (2016); Zhang et al., “Diagnostic and Prognostic Value of MicroRNA-21 in Colorectal Cancer: an Original Study and Individual Participant Data Meta-Analysis,” Cancer Epidemiol. Biomark. Prev. 23(12):2783-2792 (2016); Fang et al., “Plasma Levels of MicroRNA-24, MicroRNA-320a, and Micro-RNA-423-5p are Potential Biomarkers for Colorectal Carcinoma,” J. Exp. Clin. Cancer Res. 34:86 (2015); Toiyama et al., “MicroRNAs as Potential Liquid Biopsy Biomarkers in Colorectal Cancer: A Systematic Review,” Biochim. Biophys. Acta. pii: 50304-419X(18)30067-2 (2018); Nagy et al., “Comparison of Circulating miRNAs Expression Alterations in Matched Tissue and Plasma Samples During Colorectal Cancer Progression,” Pathol. Oncol. Res. doi: 10.1007/s12253-017-0308-1 (2017); Wang et al., “Novel Circulating MicroRNAs Expression Profile in Colon Cancer: a Pilot Study,” Eur. J. Med. Res. 22(1):51 (2017); U.S. Pat. No. 9,689,036 to Getts, et al.; U.S. Pat. No. 9,708,643 to Duttagupta, et al.; U.S. Pat. No. 9,868,992 to Goel, et al; U.S. Pat. No. 9,926,603 to Sozzi et al., which are hereby incorporated by reference in their entirety). Additional approaches for detecting low abundance miRNA are described in WO2016057832A2, which is hereby incorporated by reference in its entirety, or using other suitable means known in the art. FIG. 39 provides a list of blood-based, colon cancer-specific microRNA markers derived through analysis of TCGA microRNA datasets, which may be present in exosomes, tumor-associated vesicles, Argonaute complexes, or other protected states in the blood.

[0301] Several methods have been reported for detecting cancer-specific ncRNA or lncRNAs in the serum, plasma, or exosomes of patients with colorectal (and other) cancers; these ncRNAs include but are not limited to: NEAT_v1; NEAT_v2; CCAT1; HOTAIR; CRNDE-h; H19; MALAT1; 91H; GAS5 (Wu et al., “Nuclear-enriched Abundant Transcript 1 as a Diagnostic and Prognostic Biomarker in Colorectal Cancer,” Mol. Cancer 14:191 (2015); Zhao et al., “Combined Identification of Long Non-Coding RNA CCAT1 and HOTAIR in Serum as an Effective Screening for Colorectal Carcinoma,” Int. J. Clin. Exp. Pathol. 8(11):14131-40 (2015); Liu et al., “Exosomal Long Noncoding RNA CRNDE-h as a Novel Serum-Based Biomarker for Diagnosis and Prognosis of Colorectal Cancer,” Oncotarget 7(51):85551-85563 (2016); Slaby O, “Non-coding RNAs as Biomarkers for Colorectal Cancer Screening and Early Detection,” Adv Exp Med Biol. 937:153-70 (2016); Gao et al., “Exosomal lncRNA 91H is Associated With Poor Development in Colorectal Cancer by Modifying HNRNPK Expression,” Cancer Cell Int. 23; 18.11 (2018); Liu et al., “Prognostic and Predictive Value of Long Non-Coding RNA GAS5 and MicroRNA-221 in Colorectal Cancer and Their Effects on Colorectal Cancer Cell Proliferation, Migration and Invasion,” Cancer Biomark. 22(2):283-299 (2018); U.S. Pat. No. 9,410,206 to Hoon, et al.; U.S. Pat. No. 9,921,223 to Kalluri et al., which are hereby incorporated by reference in their entirety). Additional approaches for detecting low abundance lncRNA, ncRNA, mRNA translocations, splice variants, alternative transcripts, alternative start sites, alternative coding sequences, alternative non-coding sequences, alternative splicing, exon insertions, exon deletions, and intron insertions are described in WO2016057832A2, which is hereby incorporated by reference in its entirety, or using other suitable means known in the art. FIG. 40 provides a list of blood-based, colon cancer-specific ncRNA and lncRNA markers derived through analysis of various publicly available Affymetrix Exon ST CEL data, which were aligned to GENCODE annotations to generate ncRNA and lncRNA transriptome datasets. Comparative analyses across these datasets (various cancer types, along with normal tissues, and peripheral blood) were conducted to generate the ncRNA and lncRNA markers list (FIG. 40). Such lncRNA and ncRNA may be enriched in exosomes or other protected states in the blood. In addition, FIG. 41 provides a list of blood-based colon cancer-specific exon transcripts that may be enriched in exosomes, tumor-associated vesicles, or other protected states in the blood.

[0302] The most common protein marker for colorectal cancer is based on detecting hemoglobin from blood in the stool and is known as the FOBT or FIT test. Sensitivity and specificities (Sens.: Spec.) for these tests have been reported as: OC-Light iFOB Test (also called OC Light S FIT), manufactured by Polymedco (78.6%-97.0%:88.0%-92.8%); QuickVue iFOB, manufactured by Quidel (91.9%:74.9%); Hemosure One-Step iFOB Test, manufactured by Hemosure, Inc. (54.5%:90.5%); InSure FIT, manufactured by ClinicalGenomics (75.0%:96.6%); Hemoccult-ICT, manufactured by Beckman Coulter (23.2%-81.8%:95.8%-96.9%); Cologuard—stool FIT-DNA, manufactured by Exact Sciences (92.3%; 84.4%). The large ranges and differences in sensitivities and specificities may reflect the range from early to late cancer, as well as differences in methodology, number of samples collected, and clinical study size. Cut-off values for FIT tests may range from 10 ug protein/gram stool to 300 ug protein/gram stool (See Robertson et al., “Recommendations on Fecal Immunochemical Testing to Screen for Colorectal Neoplasia: a Consensus Statement by the US Multi-Society Task Force on Colorectal Cancer,” Gastrointest. Endow. 85(1):2-21 (2017), which is hereby incorporated by reference in its entirety).

[0303] A number of tumor-associated antigens elicit an immune response within the patient, and these may be identified as autoantibodies, or indirectly as increased cytokines in the serum. Some tumor antigens may be detected directly within the serum, or on the surface of cancer-associated exosomes or extracellular vesicles, while others may be detected indirectly, for example by an increase in mRNA within cancer-associated exosomes or extracellular vesicles. These cancer-specific proteins markers may be identified through, mRNA sequences, protein expression levels, protein product concentrations, cytokines, or autoantibody to the protein product, and these markers include but are not limited to: RPH3AL; RPL36; SLP2; TP53; Survivin; ANAXA4; SEC61B; CCCAP; NYCO16; NMDAR; PLSCR1; HDAC5; MDM2; STOML2; SEC61-beta; IL8; TFF3; CA11-19; IGFBP2; DKK3; PKM2; DC-SIGN; DC-SIGNR; GDF-15; AREG; FasL; Flt3L; IMPDH2; MAGEA4; BAG4; IL6ST; VWF; EGFR; CD44; CEA; NSE; CA 19-9, CA 125; NMMT; PSA; proGRP; DPPIV/seprase complex; TFAP2A; E2F5; CLIC4; CLIC1; TPM1; TPM2; TPM3; TPM4; CTSD-30; PRDX-6; LRG1; TTR; CLU; KLKB1; C1R; KLK3; KLK2; HOXB13; GHRL2; FOXA1 (Fan et al., “Development of a Multiplexed Tumor-Associated Autoantibody-Based Blood Test for the Detection of Colorectal Cancer,” Clin. Chim. Acta. 475:157-163 (2017); Xia et al., “Prognostic Value, Clinicopathologic Features and Diagnostic Accuracy of Interleukin-8 in Colorectal Cancer: a Meta-Analysis,” PLoS One 10(4):e0123484 (2015); Li et al., “Serum Trefoil Factor 3 as a Protein Biomarker for the Diagnosis of Colorectal Cancer,” Technol. Cancer. Res. Treat. 16(4):440-445 (2017); Overholt et al., “CA11-19: a Tumor Marker for the Detection of Colorectal Cancer,” Gastrointest. Endosc. 83(3):545-551 (2016); Fung et al., “Blood-based Protein Biomarker Panel for the Detection of Colorectal Cancer,” PLoS One 10(3): e0120425 (2015); Jiang et al., “The Clinical Significance of DC-SIGN and DC-SIGNR, Which are Novel Markers Expressed in Human Colon Cancer,” PLoS One 9(12):e11474 (2014).; Chen et al., “Development and Validation of a Panel of Five Proteins as Blood Biomarkers for Early Detection of Colorectal Cancer,” Clin. Epidemiol. 9:517-526 (2017); Chen et al., “Prospective Evaluation of 64 Serum Autoantibodies as Biomarkers for Early Detection of Colorectal Cancer in a True Screening Setting,” Oncotarget 7(13):16420-32 (2016); Rho et al., “Protein and Glycomic Plasma Markers for Early Detection of Adenoma and Colon Cancer,” Gut 67(3):473-484 (2018); U.S. Pat. No. 9,518,990 to Wild et al.; U.S. Pat. No. 9,835,636 to Chan et al.; U.S. Pat. No. 9,885,718 to Man et al.; U.S. Pat. No. 9,889,135 to Andy Koff et al.; U.S. Pat. No. 9,903,870 to Speicher et al.; U.S. Pat. No. 9,914,974 to Bajic et al.; U.S. Pat. No. 9,983,208 to Choi et al; U.S. Pat. No. 10,030,271 to Scher et al., which are hereby incorporated by reference in their entirety). Additional approaches for detecting low abundance mRNA translocations, splice variants, alternative transcripts, alternative start sites, alternative coding sequences, alternative non-coding sequences, alternative splicing, exon insertions, exon deletions, and intron insertions are described in WO2016057832A2, which is hereby incorporated by reference in its entirety, or using other suitable means known in the art, FIG. 42 provides a list of cancer protein markers, identified through mRNA sequences, protein expression levels, protein product concentrations, cytokines, or autoantibody to the protein product arising from Colorectal tumors, which may be identified in the blood, either within exosomes, other protected states, tumor-associated vesicles, or free within the plasma. FIG. 43 provides protein markers that can be secreted by Colorectal tumors into the blood. A comparative analysis was performed across various TCGA datasets (tumors, normals), followed by an additional bioinformatics filter (Meinken et al., “Computational Prediction of Protein Subcellular Locations in Eukaryotes: an Experience Report,” Computational Molecular Biology 2(1):1-7 (2012), which is hereby incorporated by reference in its entirety), which predicts the likelihood that the translated protein is secreted by the cells.

[0304] The distribution of mutations in colorectal cancers are available in the public COSMIC database, with the 20 most commonly altered genes listed as: APC; TP53; KRAS; FAT4; LRP1B; PIK3CA; TGFBR2; ACVR2A; BRAF; ZFHX3; KMT2C; KMT2D; FBXW7; SMAD4; ARID1A; TRRAP; RNF43: FAT1; TCF7L2; PREX2 (Forbes et al., “COSMIC: Exploring the World's Knowledge of Somatic Mutations in Human Cancer,” Nucleic Acids Res. 43(Database issue):D805-811 (2015), which is hereby incorporated by reference in its entirety). Analysis of TCGA COADREAD mutational dataset, however indicate the following genes have at least 10% mutation rate among colorectal cancer primary tumors: APC, TP53, KRAS, TTN, SYNE1, PIK3CA, FAT4, MUC16, FBXW7, LRP1B, LRP2, DNAH5, DMD, ANK2, RYR2, FLG, HMCN1, FAT2, TCF7L2, CSMD3, USH2A, SDK1, CSMD1, COL6A3, DNAH2, SMAD4, PKHD1, FAM123B, ATM, ACVR2A, MDN1, DCHS2, ZFHX4, CUBN, CSMD2, FREM2, RYR1, TGFBR2, RYR3, SACS, DNAH10, ABCA12, BRAF, ODZ1, PCDH9, MACF1, AHNAK2. In addition to the approaches described herein, there are several approaches for enriching for and detecting low-abundance mutations either at the DNA or mRNA level (for example, mRNA within exosomes), including but not limited to next generation sequencing, allele-specific PCR, ARMS, primer-extension PCR, using blocking primers, full-COLD-PCR, fast-COLD-PCR, ice-COLD-PCR, E-ice-COLD-PCR, TT-COLD-PCR, etc. (Mauger et al., “COLD-PCR Technologies in the Area of Personalized Medicine: Methodology and Applications,” Mol. Diagn Ther. (3):269-283 (2017); Sefrioui et al., “Comparison of the Quantification of KRAS Mutations by Digital PCR and E-ice-COLD-PCR in Circulating-Cell-Free DNA From Metastatic Colorectal Cancer Patients,” Clin. Chim. Acta. 465:1-4 (2017); U.S. Pat. No. 9,062,350 to Platica; U.S. Pat. No. 9,598,735 to Song et al., which are hereby incorporated by reference in their entirety). Additional approaches for detecting low abundance mutations are described in WO2016057832A2, which is hereby incorporated by reference in its entirety, or using other suitable means known in the art.

[0305] The best studied blood-based methylation markers for CRC detection are located in the promoter region of the SEPT9 gene (Church et al., “Prospective Evaluation of Methylated SEPT9 in Plasma for Detection of Asymptomatic Colorectal Cancer,” Gut 63(2):317-325 (2014); Lofton-Day et al., “DNA Methylation Biomarkers for Blood-Based Colorectal Cancer Screening,” Clinical Chemistry 54(2):414-423 (2008); Potter et al., “Validation of a Real-time PCR-based Qualitative Assay for the Detection of Methylated SEPT9 DNA in Human Plasma,” Clinical Chemistry 60(9):1183-1191 (2014); Ravegnini et al., “Simultaneous Analysis of SEPT9 Promoter Methylation Status, Micronuclei Frequency, and Folate-Related Gene Polymorphisms: The Potential for a Novel Blood-Based Colorectal Cancer Biomarker,” International Journal of Molecular Sciences 16(12):28486-28497 (2015); Toth et al., “Detection of Methylated SEPT9 in Plasma is a Reliable Screening Method for Both Left- and Right-sided Colon Cancers,” PloS One 7(9):e46000 (2012); Toth et al., “Detection of Methylated Septin 9 in Tissue and Plasma of Colorectal Patients With Neoplasia and the Relationship to the Amount of Circulating Cell-free DNA,” PloS One 9(12):e115415 (2014); Warren et al., “Septin 9 Methylated DNA is a Sensitive and Specific Blood Test for Colorectal Cancer,” BMC Medicine 9:133 (2011), which are hereby incorporated by reference in their entirety), and other potential markers for CRC diagnostics include CpG sites on promoter regions of THBD, C9orf50, ZNF154, AGBL4, FLI1, and TWIST1 (Lange et al., “Genome-scale Discovery of DNA-methylation Biomarkers for Blood-based Detection of Colorectal Cancer,” PloS One 7(11):e50266 (2012); Margolin et al., “Robust Detection of DNA Hypermethylation of ZNF154 as a Pan-Cancer Locus with in Silico Modeling for Blood-Based Diagnostic Development,” The Journal of Molecular Diagnostics: JMD 18(2):283-298 (2016); Lin et al., “Clinical Relevance of Plasma DNA Methylation in Colorectal Cancer Patients Identified by Using a Genome-Wide High-Resolution Array,” Ann. Surg. Oncol. 22 Suppl 3:S1419-1427 (2015), which are hereby incorporated by reference in their entirety).

[0306] SEPT9 methylation is the basis for Epi proColon test, a CRC-detection assay by Epigenomics (Lofton-Day et al, “DNA Methylation Biomarkers for Blood-based Colorectal Cancer Screening,” Clinical Chemistry 54(2):414-423 (2008), which is hereby incorporated by reference in its entirety). While initial results on smaller sample sets showed promise, large-scale studies with 1,544 plasma samples showed a sensitivity of 64% for stage I-III CRC, and a specificity of 78%-82%, effectively sending 180 to 220 out of 1,000 individuals to unnecessary colonoscopies (Potter et al., “Validation of a Real-time PCR-based Qualitative Assay for the Detection of Methylated SEPT9 DNA in Human Plasma,” Clinical Chemistry 60(9):1183-1191 (2014), which is hereby incorporated by reference in its entirety). ClinicalGenomics is currently developing blood-based CRC detection test based on the methylation of the BCAT1 and IKZF1 genes (Pedersen et al., “Evaluation of an Assay for Methylated BCAT1 and IKZF1 in Plasma for Detection of Colorectal Neoplasia,” BMC Cancer 15:654 (2015), which is hereby incorporated by reference in its entirety). Large-scale studies using 2,105 plasma samples of this two-marker test showed an overall sensitivity of 66%, with 38% for stage I CRC, and an impressive specificity of 94%. Exact Sciences and collaborators have slightly improved the sensitivity of CRC fecal tests (Bosch et al., “Analytical Sensitivity and Stability of DNA Methylation Testing in Stool Samples for Colorectal Cancer Detection,” Cell Oncol. (Dordr) 35(4):309-315 (2012); Hong et al., “DNA Methylation Biomarkers of Stool and Blood for Early Detection of Colon Cancer,” Genet. Test. Mol. Biomarkers 17(5):401-406 (2013); Imperiale et al., “Multitarget Stool DNA Testing for Colorectal-Cancer Screening,” N. Engl. J. Med. 370(14):1287-1297 (2014); Xiao et al., “Validation of Methylation-Sensitive High-resolution Melting (MS-FIRM) for the Detection of Stool DNA Methylation in Colorectal Neoplasms,” Clin. Chim. Acta. 431:154-163 (2014); Yang et al., “Diagnostic Value of Stool DNA Testing for Multiple Markers of Colorectal Cancer and Advanced Adenoma: a Meta-Analysis,” Can. J. Gastroenterol. 27(8):467-475 (2013), which are hereby incorporated by reference in their entirety), by adding K-ras mutation as well as BMP3 and NDRG4 methylation markers (Lidgard et al., “Clinical Performance of an Automated Stool DNA Assay for Detection of Colorectal Neoplasia,” Clin. Gastroenterol. Hepatol. 11(10): 1313-1318 (2013), which is hereby incorporated by reference in its entirety). Epigenetic changes may mark not only the DNA (as methylation or hydroxy-methylation of promoter CpG sites) but also by appending methyl or acetyl groups on the histone proteins that bind to these promoters. These different epigenetic marks may be detected in circulating nucleosomes of colorectal cancer patients (Rahier et al., “Circulating Nucleosomes as New Blood-based Biomarkers for Detection of Colorectal Cancer,” Clin Epigenetics 9:53 (2017), which is hereby incorporated by reference in its entirety). The identification of blood-based, cancer-specific methylation markers has employed the entire TCGA Illumina 450K methylation datasets (consisting of primary tumors, matching normal for 33 types of cancer including CRC), along with additional methylation datasets (primary tumors, normal tissues, cell lines, peripheral blood, immune cells) from the Gene Expression Omnibus (GEO). In order to identify CRC-specific methylation markers, comparative statistical analyses of these datasets were used to identify candidate methylation markers with the following characteristics: highly methylated in CRC tissues and cell lines, unmethylated in normal colon, unmethylated in peripheral blood and immune infiltrates, unmethylated in most other cancer types. Validating the bioinformatic scheme, these methodologies also identified CpG sites previously reported to be hypermethylated in plasma from CRC patients (Church et al., “Prospective Evaluation of Methylated SEPT9 in Plasma for Detection of Asymptomatic Colorectal Cancer,” Gut 63(2):317-325 (2014); Lofton-Day et al., “DNA Methylation Biomarkers for Blood-based Colorectal Cancer Screening,” Clinical Chemistry 54(2):414-423 (2008); Toth et al., “Detection of Methylated SEPT9 in Plasma is a Reliable Screening Method for Both Left- and Right-sided Colon Cancers,” PloS One 7(9):e46000 (2012); Warren et al., “Septin 9 Methylated DNA is a Sensitive and Specific Blood Test for Colorectal Cancer,” BMC Medicine 9:133 (2011); Lange et al., “Genome-scale Discovery of DNA-methylation Biomarkers for Blood-based Detection of Colorectal Cancer,” PloS One 7(11):e50266 (2012); Margolin et al., “Robust Detection of DNA Hypermethylation of ZNF154 as a Pan-Cancer Locus with in Silico Modeling for Blood-Based Diagnostic Development,” The Journal of Molecular Diagnostics: JMD 18(2):283-298 (2016); Lin et al., “Clinical Relevance of Plasma DNA Methylation in Colorectal Cancer Patients Identified by Using a Genome-Wide High-Resolution Array,” Ann. Surg. Oncol. 22 Suppl 3:S1419-1427 (2015); Pedersen et al., “Evaluation of an Assay for Methylated BCAT1 and IKZF1 in Plasma for Detection of Colorectal Neoplasia,” BMC Cancer 15:654 (2015), which are hereby incorporated by reference in their entirety). To ensure that these methylation sites were specific to CRC and not a result of aging-related methylation (McClay et al., “A Methylome-wide Study of Aging Using Massively Parallel Sequencing of the Methyl-CpG-enriched Genomic Fraction From Blood in Over 700 subjects,” Hum. Mol. Genet. 23(5):1175-1185 (2014), which is hereby incorporated by reference in its entirety), the Pearson correlation was calculated between levels of methylation and patient age. Furthermore, hypermethylation of these sites did not significantly correlate with MSI status, implying that markers have been identified for all CRC subtypes. Overall, ˜10,000 tissue samples, >4 billion datapoints (datapoint=CpG percentage methylation per sample) were analyzed to identify an initial list of few hundred CRC-specific markers. CpG markers consistently show up in many types of cancer and are labeled as potential Pan-Oncology markers. Additional approaches for detecting low abundance 5 mC (or 5 hmC) are described in WO2016057832A2, which is hereby incorporated by reference in its entirety, or using other suitable means known in the art. FIG. 44 provides a list of primary CpG sites that are Colorectal Cancer and Colon-tissue specific markers, that may be used to identify the presence of colorectal cancer from cfDNA, or DNA within exosomes, or DNA in other protected states (such as within CTCs) within the blood. FIG. 45 provides a list of chromosomal regions or sub-regions within which are primary CpG sites that are Colorectal Cancer and Colon-tissue specific markers, that may be used to identify the presence of colorectal cancer from cfDNA, or DNA within exosomes, or DNA in other protected states (such as within CTCs) within the blood.

[0307] Mutation or methylation status may give a clear analytical cut-off, i.e. the assay either records a mutation or CpG methylation event, and false-positives are a consequence of biology, for example from age-related methylation. With other markers there may be a greater overlap between marker level for individuals with cancer and their matched normal controls, especially in attempting to identify cancer at the earliest stages. In such cases, cut-offs may be defined by “Z-score”, 2 standard deviations above normal values, or by setting the false-positive rate at an arbitrary level, i.e. 5% when evaluating a suitable set of age-matched normal samples. Generally, the set of age-matched normal should be suitably large enough to set cut-off of the marker-specific signal from a given disease sample at >85%; >90%; >95%; >96%; >97%; or >98% of the same marker-specific signals from the set of normal samples. The “Z-score” may be calculated using the formula: Z=(X−μ)/σ; where Z=Z-score, X=each value in the dataset, μ=mean of all values in the dataset, and σ=standard deviation of a sample. Likewise, when using the Z-score, the cut-off for marker-specific signal from a given disease sample may be set at a z-score of >1.03; >1.28; >1.65; >1.75; >1.88; or >2.05 compared to the same marker-specific signals from the set of normal samples. In some assays, marker levels, (i.e. DNA methylation levels for several gene promoter regions in plasma, or miRNA levels in urine) are quantified in relation to another marker, either internal or externally added in a qPCR reaction, where the cut-off is determined as a ΔCt value in the assay (Fackler et al., “Novel Methylated Biomarkers and a Robust Assay to Detect Circulating Tumor DNA in Metastatic Breast Cancer,” Cancer Res. 74(8):2160-70 (2014); U.S. Pat. No. 9,416,404 to Sukumar et al., which are hereby incorporated by reference in their entirety). Methylation status at defined promoter regions may also be determined using digital bisulfite genomic sequencing and digital MethyLight assays; using bisulfite conversion and preferential amplification of converted methylated sequences by blocking primers that interfere with amplification of converted unmethylated sequences; or depletion of unmethylated DNA using methyl-sensitive restriction endonucleases, followed by PCR (see U.S. Pat. No. 9,290,803 to Laird et al.; U.S. Pat. No. 9,476,100 to Frumkin, et al.; U.S. Pat. No. 9,765,397 to McEvoy et al.; U.S. Pat. No. 9,896,732 to Tabori et al.; U.S. Pat. No. 9,957,575 to Kottwitz et al., which are hereby incorporated by reference in their entirety).

[0308] The genome-wide methylation profile of cfDNA (known as the methylome) can be determined using next-generation sequencing, and the methylation pattern may be used to identify the presence of fetal, tumor, or other tissue DNA in the plasma (Sun et al., “Plasma DNA Tissue Mapping by Genome-wide Methylation Sequencing for Noninvasive Prenatal, Cancer, and Transplantation Assessments,” Proc. Natl. Acad. Sci. USA 112(40):E5503-12 (2015); Lehmann-Werman et al., “Identification of Tissue-specific Cell Death Using Methylation Patterns of Circulating DNA,” Proc. Natl. Acad. Sci. USA 113(13):E1826-34 (2016); U.S. Pat. No. 9,732,390 to Lo et al.; U.S. Pat. No. 9,984,201 to Zhang et al., which are hereby incorporated by reference in their entirety).

[0309] The aforementioned two-step screening assay sensitivities and specificities were calculated based on having an initial screen (with fewer markers) that cast a wide net to maximize sensitivity, followed by a second test (with more markers) on the initial presumptive positive samples, but the second test not only maintains the sensitivity, but also achieves high specificity to obtain a respectable positive predictive value. While colorectal cancer is a more frequent cancer, other cancers are less common, so achieving a good positive predictive value is critical to avoiding unnecessary follow-up diagnostic procedures. These initial calculations (in FIGS. 33-37) focused on methylation markers, with an average sensitivity of 50%, and individual marker false-positives ranging from 2%-5%, and average number of molecules in the blood set at 300 molecules. As a benchmark for these initial calculations, a mutation marker would give an overall sensitivity of 40%. In order to explore the influence of combining the methylation markers with other markers that may differ in both these values, additional calculations were performed, with an emphasis on potentially identifying the earliest (i.e. Stage I cancers), where the average number of molecules in the blood may be as low as 150 molecules. Four types of calculations were performed: (A) Average individual markers at 50% sensitivity and 2%-5% false-positives, with one marker (i.e. a protein marker) at 90% sensitivity but with 10% false-positives; (B) Average individual markers at 50% sensitivity and 2%-5% false-positives, with one marker at 80% sensitivity but with 15% false-positives; (C) Average individual markers at 50% sensitivity and 2%-5% false-positives, with two markers at 90% sensitivity each but with 10% false-positives each; and (D) Average individual markers at 50% sensitivity and 2%-5% false-positives, with two markers at 80% sensitivity each but with 15% false-positives each.

[0310] FIGS. 47-48 illustrate results for calculated overall Sensitivity and Specificity for 24 markers using conditions (A) and (C). The sensitivity curves provide overall sensitivity as a function of the average number of molecules in the blood for each marker, with separate curves for each minimum number of markers needed to call a sample as positive. The specificity curves provide overall specificity as a function of individual marker false-positive rates, again with separate curves for each minimum number of markers needed to call a sample as positive. The calculated numbers for overall Sensitivity and Specificity for 24 markers using the above 4 conditions are provided in the tables below.

TABLE 14
24 Markers Sensitivity
Avg. Indiv. Mkr,: 50% Sensitivity; One Mkr 90% Sensitivity

| Average | | | | |
|---|---|---|---|---|
| Number of | | 24 markers, | 24 markers, | 24 markers, |
| Molecules in | Mutation, 1 | Minimum 3 | Minimum 4 | Minimum 5 |
| Blood | Positive | Positive | Positive | Positive |
| 150 | 22.1% | 88.2% | 68.9% | 44.4% |
| 200 | 28.1% | 95.7% | 86.4% | 69.2% |
| 300 | 39.4% | 99.3% | 97.6% | 93.3% |
| 400 | 48.8% | 99.9% | 99.5% | 98.6% |
| 480 | 55.1% | 100.0% | 99.9% | 99.5% |
| 600 | 63.2% | 100.0% | 100.0% | 99.9% |

TABLE 15
24 Markers Specificity
Avg. Indiv. Mkr,: 2%-5% FP; One Mkr.: 10% FP

| Individual | Minimum 3 | Minimum 4 | Minimum 5 |
|---|---|---|---|
| marker FP | Markers | Markers | Markers |
| rate | Positive | Positive | Positive |
| 2% | 91.9% | 99.1% | 99.9% |
| 3% | 81.8% | 97.1% | 99.7% |
| 4% | | 93.2% | 98.9% |
| 5% | | 86.7% | 97.3% |

TABLE 16
24 Markers Sensitivity
Avg. Indiv. Mkr: 50% Sensitivity; One Mkr: 80% Sensitivity

| Average | | | | |
|---|---|---|---|---|
| Number of | | 24 markers, | 24 markers, | 24 markers, |
| Molecules in | Mutation, 1 | Minimum 3 | Minimum 4 | Minimum 5 |
| Blood | Positive | Positive | Positive | Positive |
| 150 | 22.1% | 84.8% | 65.1% | 41.5% |
| 200 | 28.1% | 93.5% | 83.1% | 65.6% |
| 300 | 39.4% | 98.7% | 96.2% | 90.9% |
| 400 | 48.8% | 99.7% | 99.1% | 97.7% |
| 480 | 55.1% | 99.9% | 99.7% | 99.2% |
| 600 | 63.2% | 100.0% | 100.0% | 99.8% |

TABLE 17
24 Markers Specificity
Avg. Indiv. Mkr,: 2%-5% FP; One Mkr.: 15% FP

| Individual | Minimum 3 | Minimum 4 | Minimum 5 |
|---|---|---|---|
| marker FP | Markers | Markers | Markers |
| rate | Positive | Positive | Positive |
| 2% | 87.9% | 98.7% | 99.9% |
| 3% | | 95.7% | 99.5% |
| 4% | | 89.8% | 98.4% |
| 5% | | 80.1% | 96.0% |

TABLE 18
24 Markers Sensitivity
Avg. Indiv. Mkr: 50% Sensitivity; Two Mkrs: 90% Sensitivity

| Average | | | | |
|---|---|---|---|---|
| Number of | | 24 markers, | 24 markers, | 24 markers, |
| Molecules in | Mutation, 1 | Minimum 3 | Minimum 4 | Minimum 5 |
| Blood | Positive | Positive | Positive | Positive |
| 150 | 22.1% | 90.9% | 71.9% | 46.7% |
| 200 | 28.1% | 97.4% | 89.0% | 72.0% |
| 300 | 39.4% | 99.8% | 98.8% | 95.2% |
| 400 | 48.8% | 100.0% | 99.9% | 99.4% |
| 480 | 55.1% | 100.0% | 100.0% | 99.8% |
| 600 | 63.2% | 100.0% | 100.0% | 100.0% |

TABLE 19
24 Markers Specificity
Avg. Indiv. Mkr,: 2%-5% FP; Two Mkrs.: 10% FP

| Individual | Minimum 3 | Minimum 4 | Minimum 5 |
|---|---|---|---|
| marker FP | Markers | Markers | Markers |
| rate | Positive | Positive | Positive |
| 2% | | 95.7% | 99.7% |
| 3% | | 90.4% | 98.9% |
| 4% | | 83.0% | 97.3% |
| 5% | | | 94.7% |

TABLE 20
24 Markers Sensitivity
Avg. Indiv. Mkr,: 50% Sensitivity; Two Mkrs: 80% Sensitivity

| Average | | | | |
|---|---|---|---|---|
| Number of | | 24 markers, | 24 markers, | 24 markers, |
| Molecules in | Mutation, 1 | Minimum 3 | Minimum 4 | Minimum 5 |
| Blood | Positive | Positive | Positive | Positive |
| 150 | 22.1% | 90.2% | 71.1% | 46.1% |
| 200 | 28.1% | 97.0% | 88.4% | 71.3% |
| 300 | 39.4% | 99.6% | 98.5% | 94.7% |
| 400 | 48.8% | 99.9% | 99.8% | 99.2% |
| 480 | 55.1% | 100.0% | 99.9% | 99.8% |
| 600 | 63.2% | 100.0% | 100.0% | 100.0% |

TABLE 21
24 Markers Specificity
Avg. Indiv. Mkr,: 2%-5% FP; Two Mkrs.: 15% FP

| Individual | Minimum 3 | Minimum 4 | Minimum 5 |
|---|---|---|---|
| marker FP | Markers | Markers | Markers |
| rate | Positive | Positive | Positive |
| 2% | | 90.4% | 99.2% |
| 3% | | | 97.4% |
| 4% | | | 93.9% |
| 5% | | | 88.0% |

[0311] Before evaluating what advantages, if any, there are to combining protein (or other markers) with methylation markers, an analysis is performed on the original 24 marker set, with average individual marker sensitivity at 50%, and 2%-5% false positive rates. In this example, if there is an average of 150 molecules in the blood for the earliest cancer (Stage I), and if that would cover at least one mutation, then the sensitivity for identifying such a cancer by next generation sequencing would be 22.1% (See FIG. 33A). If the individual marker FP rate is 3%, then if there is a 3-marker minimum, then overall FP rate is 5.4% for 24 markers, for a specificity of 94.6% (See FIG. 33B). At 3 markers, for Stage I cancer (at about 150 molecules of each positive marker in the blood), the test would miss 42.3%; i.e. for Stage I cancer the overall sensitivity would be 57.7% (See FIG. 33A). However, if the individual marker FP rate is 5%, then if there is a 4-marker minimum, then overall FP rate is 6.6% for 24 markers, for a specificity of 93.4% (See FIG. 33B). At 4 markers, for Stage I cancer (at about 150 molecules of each positive marker in the blood), the test would miss 64.7%; i.e. for Stage I cancer the sensitivity would be 35.3% (See FIG. 33A). While the specificity is reasonable, limiting the number of samples that would need to be retested in the second step of the assay, the assay would miss ⅔^{rd} of the earliest cancers.

[0312] The above numbers are compared to the graph in FIG. 46, i.e. condition (A), with average individual markers at 50% sensitivity and 2%-5% false-positives, with one marker (i.e. a protein marker) at 90% sensitivity but with 10% false-positives. While use of only 3 markers positive out of 24 markers provides a sensitivity of 88.2%, even with an individual marker 2% FP rate, the specificity would be 91.9%, if the FP rate were 3%, the overall specificity drops to 81.8%. This is the negative influence of the single marker with the high FP rate of 10%. Use of 4 markers positive out of 24 markers provides a sensitivity of 68.9%—still better than the original number of 57.7%, but now specificity improves to 97.1% with individual marker FP rates of 3%.

[0313] For condition (B), the average individual markers are at 50% sensitivity and 2%-5% false-positives, with one marker at 80% sensitivity but with 15% false-positives. Under these conditions, the specificity for 3 markers positive out of 24 markers would be at 87.9%, and thus would most likely not be used. Use of 4 markers positive out of 24 markers provides a sensitivity of 65.1%—still better than the original number of 57.7%, but now specificity improves to 95.7% with individual marker FP rates of 3%.

[0314] What if there are two markers with higher sensitivity (as well as higher FP rates)? For condition (C), with average individual markers at 50% sensitivity and 2%-5% false-positives, with two markers at 90% sensitivity each but with 10% false-positives each, see graph in FIG. 47. Under these conditions, the specificity for 3 markers positive out of 24 markers would be below 80%, and thus would not be used. Use of 4 markers positive out of 24 markers provides a sensitivity of 71.9%—still better than the original number of 57.7%, but now specificity is at 95.7% with individual marker FP rates of 2%. Should the individual marker FP rates rise to 3%, then overall specificity drops to 90.4%.

[0315] For condition (D), the average individual markers are at 50% sensitivity and 2%-5% false-positives, with two markers at 80% sensitivity each but with 15% false-positives each. Under these conditions, the specificity for 3 markers positive out of 24 markers would be below 80%, and thus would not be used. Use of 4 markers positive out of 24 markers provides a sensitivity of 71.1%—still better than the original number of 57.7%, but now specificity is at 90.4% with individual marker FP rates of 2%. Should the individual marker FP rates rise to 3%, then 5 markers would be required, and while overall specificity would rise to 97.4%, the sensitivity would drop to 46.1%, which is worse than the original number of 57.7%.

[0316] Thus, from analysis of the above 4 conditions (A-D), condition (C) provided the best improvement in overall sensitivity (71.9%) for detecting Stage I cancer, while still keeping overall specificity reasonable (95.7%) for the initial 24 marker screen, should it now include two markers with higher sensitivity (90%), but worse FP rate of 10% for each of these markers.

[0317] The calculated numbers for two of the overall Sensitivity and Specificity for 36 markers using two of the aforementioned 4 conditions: (A) Average individual markers at 50% sensitivity and 2%-5% false-positives, with one marker (i.e. a protein marker) at 90% sensitivity but with 10% false-positives; and (C) Average individual markers at 50% sensitivity and 2%-5% false-positives, with two markers at 90% sensitivity each but with 10% false-positives each—are provided in the tables below. The sensitivity curves provide overall sensitivity as a function of the average number of molecules in the blood for each marker, with separate curves for each minimum number of markers needed to call a sample as positive. The specificity curves provide overall specificity as a function of individual marker false-positive rates, again with separate curves for each minimum number of markers needed to call a sample as positive. The calculated numbers for overall Sensitivity and Specificity for 36 markers using the above two conditions are provided in the tables below.

TABLE 22
36 Markers Sensitivity
Avg. Indiv. Mkr,: 50% Sensitivity; One Mkr 90% Sensitivity

| Average | | | | | |
|---|---|---|---|---|---|
| Number of | | 36 markers, | 36 markers, | 36 markers, | 36 markers, |
| Molecules in | Mutation, 1 | Minimum 3 | Minimum 4 | Minimum 5 | Minimum 6 |
| Blood | Positive | Positive | Positive | Positive | Positive |
| 150 | 22.1% | 96.8% | 89.2% | 73.9% | 53.2% |
| 200 | 28.1% | 99.3% | 97.6% | 93.3% | 84.1% |
| 240 | 33.0% | 99.7% | 99.1% | 97.4% | 93.4% |
| 300 | 39.4% | 99.9% | 99.8% | 99.3% | 98.3% |
| 400 | 48.8% | 100.0% | 100.0% | 99.9% | 99.8% |
| 480 | 55.1% | 100.0% | 100.0% | 100.0% | 100.0% |
| 600 | 63.2% | 100.0% | 100.0% | 100.0% | 100.0% |

TABLE 23
36 Markers Specificity
Avg. Indiv. Mkr,: 2%-5% FP; One Mkr.: 10% FP

| | Minimum | Minimum | Minimum | Minimum |
|---|---|---|---|---|
| Individual | 4 | 5 | 6 | 7 |
| marker FP | Markers | Markers | Markers | Markers |
| rate | Positive | Positive | Positive | Positive |
| 2% | 95.3% | 99.4% | 99.9% | 100.0% |
| 3% | 84.1% | 96.9% | 99.5% | 99.9% |
| 4% | | 90.3% | 98.0% | 99.7% |
| 5% | | | 93.9% | 98.7% |

TABLE 24
36 Markers Sensitivity
Avg. Indiv. Mkr: 50% Sensitivity; Two Mkrs: 90% Sensitivity

| | | 36 | 36 | 36 | 36 |
|---|---|---|---|---|---|
| Average | | markers, | markers, | markers, | markers, |
| Number of | Mutation, | Minimum | Minimum | Minimum | Minimum |
| Molecules | 1 | 3 | 4 | 5 | 6 |
| in Blood | Positive | Positive | Positive | Positive | Positive |
| 150 | 22.1% | 98.1% | 91.3% | 76.3% | 55.3% |
| 200 | 28.1% | 99.8% | 98.8% | 95.2% | 86.7% |
| 240 | 33.0% | 99.9% | 99.7% | 98.6% | 95.2% |
| 300 | 39.4% | 100.0% | 99.9% | 99.8% | 99.1% |
| 400 | 48.8% | 100.0% | 100.0% | 100.0% | 99.9% |
| 480 | 55.1% | 100.0% | 100.0% | 100.0% | 100.0% |
| 600 | 63.2% | 100.0% | 100.0% | 100.0% | 100.0% |

TABLE 25
36 Markers Specificity
Avg. Indiv. Mkr,: 2%-5% FP; Two Mkrs.: 10% FP

| | Minimum | Minimum | Minimum | Minimum |
|---|---|---|---|---|
| Individual | 4 | 5 | 6 | 7 |
| marker FP | Markers | Markers | Markers | Markers |
| rate | Positive | Positive | Positive | Positive |
| 2% | | 97.0% | 99.7% | 100.0% |
| 3% | | 89.8% | 98.4% | 99.8% |
| 4% | | | 95.0% | 99.1% |
| 5% | | | 87.8% | 97.4% |

[0318] What are the advantages to combining protein (or other markers) with methylation markers, an analysis is performed on the original 36 marker set, with average individual marker sensitivity at 50%, and 2%-5% false positive rates? In this example, if there is an average of 150 molecules in the blood for the earliest cancer (Stage I), and if that would cover at least one mutation, then the sensitivity for identifying such a cancer by next generation sequencing would be 22.1% (See FIG. 34A). If the individual marker FP rate is 2%, then if there is a 3-marker minimum, then overall FP rate is 5.7% for 36 markers, for a specificity of 94.3% (See FIG. 34B). At 3 markers, for Stage I cancer (at about 150 molecules of each positive marker in the blood), the test would miss 17.4%; i.e. for Stage I cancer the overall sensitivity would be 82.6% (See FIG. 34A). However, if the individual marker FP rate is 3%, then if there is a 4-marker minimum, then overall FP rate is 4.8% for 36 markers, for a specificity of 95.2% (See FIG. 34B). At 4 markers, for Stage I cancer (at about 150 molecules of each positive marker in the blood), the test would miss 34.1%; i.e. for Stage I cancer the sensitivity would be 65.8% (See FIG. 34A). While the specificity is reasonable, limiting the number of samples that would need to be retested in the second step of the assay, the assay would miss ⅓^{rd} of the earliest cancers.

[0319] The above numbers are compared to the results for condition (A), with average individual markers at 50% sensitivity and 2%-5% false-positives, with one marker (i.e. a protein marker) at 90% sensitivity but with 10% false-positives. Use of only 4 markers positive out of 36 markers provides a sensitivity of 89.2%, and with an individual marker 2% FP rate, the specificity would be 95.3%. If the FP rate were 3%, this would require use of 5 markers positive out of 36 markers to provide a sensitivity of 73.9%—still better than the original number of 65.8%, but now specificity improves to 96.9% with individual marker FP rates of 3%.

[0320] For condition (C), the average individual markers are at 50% sensitivity and 2%-5% false-positives, with two markers at 90% sensitivity each but with 10% false-positives each. Under these conditions, use of 5 markers positive out of 36 markers provides a sensitivity of 76.3%—still better than the original number of 65.8%, but now specificity is at 97.0% with individual marker FP rates of 2%. Should the individual marker FP rates rise to 3%, then overall specificity drops to 89.8%.

[0321] Thus, from analysis of the above conditions (A, C), condition (C) provided the best improvement in overall sensitivity (76.3%) for detecting Stage I cancer, while still keeping overall specificity reasonable (97.0%) for the initial 36 marker screen, should it now include two markers with higher sensitivity (90%), but worse FP rate of 10% for each of these markers.

[0322] FIGS. 49-50 illustrate results for calculated overall Sensitivity and Specificity for 48 markers using the aforementioned 2 conditions: (A) Average individual markers at 50% sensitivity and 2%-5% false-positives, with one marker (i.e. a protein marker) at 90% sensitivity but with 10% false-positives; and (C) Average individual markers at 50% sensitivity and 2%-5% false-positives, with two markers at 90% sensitivity each but with 10% false-positives each. The sensitivity curves provide overall sensitivity as a function of the average number of molecules in the blood for each marker, with separate curves for each minimum number of markers needed to call a sample as positive. The specificity curves provide overall specificity as a function of individual marker false-positive rates, again with separate curves for each minimum number of markers needed to call a sample as positive. The calculated numbers for overall Sensitivity and Specificity for 48 markers using the above two conditions are provided in the tables below.

TABLE 26
48 Markers Sensitivity
Avg. Indiv. Mkr,: 50% Sensitivity; One Mkr 90% Sensitivity

| Average | | | | | | |
|---|---|---|---|---|---|---|
| Number of | | 48 markers, | 48 markers, | 48 markers, | 48 markers, | 48 markers, |
| Molecules | Mutation, 1 | Minimum 4 | Minimum 5 | Minimum 6 | Minimum 7 | Minimum 8 |
| in Blood | Positive | Positive | Positive | Positive | Positive | Positive |
| 150 | 22.1% | 97.6% | 93.3% | 84.2% | 69.7% | 52.1% |
| 200 | 28.1% | 99.5% | 98.6% | 96.4% | 91.5% | 82.7% |
| 240 | 33.0% | 99.9% | 99.7% | 99.1% | 97.7% | 94.7% |
| 300 | 39.4% | 100.0% | 99.9% | 99.8% | 99.5% | 98.9% |
| 400 | 48.8% | 100.0% | 100.0% | 100.0% | 100.0% | 99.9% |
| 480 | 55.1% | 100.0% | 100.0% | 100.0% | 100.0% | 100.0% |
| 600 | 63.2% | 100.0% | 100.0% | 100.0% | 100.0% | 100.0% |

TABLE 27
48 Markers Specificity
Avg. Indiv. Mkr,: 2%-5% FP; One Mkr.: 10% FP

| | Minimum | Minimum | Minimum | Minimum |
|---|---|---|---|---|
| Individual | 5 | 6 | 7 | 8 |
| marker FP | Markers | Markers | Markers | Markers |
| rate | Positive | Positive | Positive | Positive |
| 2% | 97.3% | 99.6% | 100.0% | 100.0% |
| 3% | 86.1% | 97.0% | 99.5% | 99.9% |
| 4% | | 87.4% | 97.0% | 99.4% |
| 5% | | | 88.5% | 97.1% |

TABLE 28
48 Markers Sensitivity
Avg. Indiv. Mkr: 50% Sensitivity; Two Mkrs: 90% Sensitivity

| Average | | | | | | |
|---|---|---|---|---|---|---|
| Number of | | 48 markers, | 48 markers, | 48 markers, | 48 markers, | 48 markers, |
| Molecules | Mutation, 1 | Minimum 4 | Minimum 5 | Minimum 6 | Minimum 7 | Minimum 8 |
| in Blood | Positive | Positive | Positive | Positive | Positive | Positive |
| 150 | 22.1% | 98.8% | 95.2% | 86.7% | 72.4% | 54.4% |
| 200 | 28.1% | 99.9% | 99.4% | 97.8% | 93.5% | 85.2% |
| 240 | 33.0% | 100.0% | 99.9% | 99.6% | 98.7% | 96.2% |
| 300 | 39.4% | 100.0% | 100.0% | 99.9% | 99.8% | 99.5% |
| 400 | 48.8% | 100.0% | 100.0% | 100.0% | 100.0% | 100.0% |
| 480 | 55.1% | 100.0% | 100.0% | 100.0% | 100.0% | 100.0% |
| 600 | 63.2% | 100.0% | 100.0% | 100.0% | 100.0% | 100.0% |

TABLE 29
48 Markers Specificity
Avg. Indiv. Mkr,: 2%-5% FP; Two Mkrs.: 10% FP

| | Minimum | Minimum | Minimum | Minimum |
|---|---|---|---|---|
| Individual | 5 | 6 | 7 | 8 |
| marker FP | Markers | Markers | Markers | Markers |
| rate | Positive | Positive | Positive | Positive |
| 2% | 86.3% | 98.0% | 99.8% | 100.0% |
| 3% | | 90.1% | 98.2% | 99.7% |
| 4% | | | 92.5% | 98.5% |
| 5% | | | | 94.1% |

[0323] What are the advantages to combining protein (or other markers) with methylation markers, an analysis is performed on the original 48-marker set, with average individual marker sensitivity at 50%, and 2%-5% false positive rates? In this example, if there is an average of 150 molecules in the blood for the earliest cancer (Stage I), and if that would cover at least one mutation, then the sensitivity for identifying such a cancer by next generation sequencing would be 22.1% (See FIG. 35A). If the individual marker FP rate is 2%, then if there is a 4-marker minimum, then overall FP rate is 3.1% for 48 markers, for a specificity of 96.9% (See FIG. 35B). At 4 markers, for Stage I cancer (at about 150 molecules of each positive marker in the blood), the test would miss 15.1%; i.e. for Stage I cancer the overall sensitivity would be 84.9% (See FIG. 35A). However, if the individual marker FP rate is 3%, then if there is a 5-marker minimum, then overall FP rate is 4.2% for 48 markers, for a specificity of 95.8% (See FIG. 35B). At 5 markers minimum, for Stage I cancer (at about 150 molecules of each positive marker in the blood), the test would miss 28.4%; i.e. for Stage I cancer the sensitivity would be 71.6% (See FIG. 35A). While the specificity is reasonable, limiting the number of samples that would need to be retested in the second step of the assay, the assay would miss a little over ¼^{th} of the earliest cancers.

[0324] The above numbers are compared to the graph in FIG. 48, i.e. condition (A), with average individual markers at 50% sensitivity and 2%-5% false-positives, with one marker (i.e. a protein marker) at 90% sensitivity but with 10% false-positives. Use of only 5 markers positive out of 48 markers provides a sensitivity of 93.3%, and with an individual marker 2% FP rate, the specificity would be 97.3%. If the FP rate were 3%, this would require use of 6 markers positive out of 48 markers to provide a sensitivity of 84.2%—still better than the original number of 71.6%, but now specificity improves to 97.0% with individual marker FP rates of 3%.

[0325] For condition (C), with average individual markers at 50% sensitivity and 2%-5% false-positives, with two markers at 90% sensitivity each but with 10% false-positives each, see graph in FIG. 49. Under these conditions, use of 5 markers positive out of 48 markers provides a sensitivity of 90.9%—still better than the original number of 71.6%, but now specificity is at 97.0% with individual marker FP rates of 2%. If the FP rate were 3%, this would require use of 6 markers positive out of 48 markers to provide a sensitivity of 81.0%—still better than the original number of 71.6%, but now specificity changes to 95.5% with individual marker FP rates of 3%.

[0326] From the above charts, the receiver operating characteristic (ROC) curves may be calculated by plotting Sensitivity vs. 1-Specificity. Since these are theoretical calculations, the curves were generated for different levels of average marker false-positive rates of 2%, 3%, 4%, and 5%. The AUC (Area under curve) were calculated for ROC curves for 24 markers, with average individual marker at 50% Sensitivity with 2%-3% FP, and one marker at 90% Sensitivity with 10% FP; 24 markers, with average individual marker at 50% Sensitivity with 2%-3% FP, and two markers at 90% Sensitivity with 10% FP; 36 markers, with average individual marker at 50% Sensitivity with 2%-3% FP, and one marker at 90% Sensitivity with 10% FP; 36 markers, with average individual marker at 50% Sensitivity with 2%-3% FP, and two markers at 90% Sensitivity with 10% FP; 48 markers, with average individual marker at 50% Sensitivity with 2%-3% FP, and one marker at 90% Sensitivity with 10% FP; and 48 markers, with average individual marker at 50% Sensitivity with 2%-3% FP, and two markers at 90% Sensitivity with 10% FP; and are provided in the Tables below. Using the benchmark of an average of 150 molecules in the blood for the earliest cancer (Stage I), and looking only at the 3% individual marker FP rate AUC values are at 77% with 24 markers (average individual marker at 50% Sensitivity), improve to 91% with 24 markers (average individual marker at 50% Sensitivity, and one marker at 90% Sensitivity with 10% FP), but decrease to 83% with 24 markers (average individual marker at 50% Sensitivity, and two markers at 90% Sensitivity with 10% FP); AUC values are at 87% with 36 markers (average individual marker at 50% Sensitivity), improve to 91% with 36 markers (average individual marker at 50% Sensitivity, and one marker at 90% Sensitivity with 10% FP), but decrease to 85% with 36 markers (average individual marker at 50% Sensitivity, and two markers at 90% Sensitivity with 10% FP); and AUC values are at 89% with 48 markers (average individual marker at 50% Sensitivity), improve to 91% with 48 markers (average individual marker at 50% Sensitivity, and one marker at 90% Sensitivity with 10% FP), and improve slightly to 92% with 48 markers (average individual marker at 50% Sensitivity, and two markers at 90% Sensitivity with 10% FP). These results illustrate that for multiple marker assays achieving good sensitivities and specificities for the earliest cancers is aided by having a single marker with above average sensitivities (i.e. 90%), even at the cost of a higher false-positive rate (i.e. 10%). There is no major benefit in sensitivity increasing the number of markers in the first step of the assay from 24 to 36 to 48 markers—but the increase in markers does improve specificity, which is important in limiting the number of samples that undergo the second step of the test.

TABLE 30
24, 36, & 48 Marker AUC Values from ROC Curves;
Avg. Indiv. Mkr,: 50% Sensitivity; One Mkr: 90% Sensitivity at 10% FP

| Total | | | | | | | |
|---|---|---|---|---|---|---|---|
| Markers: | | | | | | | |
| Individual | | | | | | | |
| marker | 150 | 200 | 240 | 300 | 400 | 480 | 600 |
| FP rate | Molecules | Molecules | Molecules | Molecules | Molecules | Molecules | Molecules |
| 24 Mkrs: 2% | 93% | 97% | | 99% | >99% | >99% | >99% |
| 24 Mkrs: 3% | 91% | 96% | | 99% | >99% | >99% | >99% |
| 35 Mkrs: 2% | 94% | 99% | >99% | >99% | >99% | >99% | >99% |
| 35 Mkrs: 3% | 91% | 96% | 99% | >99% | >99% | >99% | >99% |
| 48 Mkrs: 2% | 96% | 99% | >99% | >99% | >99% | >99% | >99% |
| 48 Mkrs: 3% | 91% | 96% | 99% | >99% | >99% | >99% | >99% |

TABLE 31
24, 36, & 48 Marker AUC Values from ROC Curves;
Avg. Indiv. Mkr,: 50% Sensitivity; Two Mkrs: 90% Sensitivity at 10% FP

| Total | | | | | | | |
|---|---|---|---|---|---|---|---|
| Markers: | | | | | | | |
| Individual | | | | | | | |
| marker | 150 | 200 | 240 | 300 | 400 | 480 | 600 |
| FP rate | Molecules | Molecules | Molecules | Molecules | Molecules | Molecules | Molecules |
| 24 Mkrs: 2% | 85% | 94% | | 99% | >99% | >99% | >99% |
| 24 Mkrs: 3% | 83% | 93% | | 99% | >99% | >99% | >99% |
| 36 Mkrs: 2% | 87% | 97% | 99% | >99% | >99% | >99% | >99% |
| 36 Mkrs: 3% | 85% | 96% | 98% | 99% | >99% | >99% | >99% |
| 48 Mkrs: 2% | 96% | 99% | >99% | >99% | >99% | >99% | >99% |
| 48 Mkrs: 3% | 92% | 98% | >99% | >99% | >99% | >99% | >99% |

[0327] While the above calculations are based on increasing the sensitivity of one or two markers, what if the average sensitivity of individual markers was increased from 50% to 66%? FIGS. 51-53 illustrate results for calculated overall Sensitivity and Specificity for 24, 36, and 48 markers, respectively. These graphs are based on the assumption that the average individual marker sensitivity is 66%, and the average individual marker false-positive rate is from 2% to 5%. The sensitivity curves provide overall sensitivity as a function of the average number of molecules in the blood for each marker, with separate curves for each minimum number of markers needed to call a sample as positive. The specificity curves provide overall specificity as a function of individual marker false-positive rates, again with separate curves for each minimum number of markers needed to call a sample as positive. The calculated numbers for overall Sensitivity and Specificity for 24, 36, and 48 markers, respectively, where the average individual marker sensitivity is 50% (as described previously) or 66% are provided in the tables below.

TABLE 32
24 Markers Sensitivity;
Avg. Indiv. Mkr,: 50% Sensitivity

| | | 24 | 24 | 24 |
|---|---|---|---|---|
| Average | | markers, | markers, | markers, |
| Number of | Mutation, | Minimum | Minimum | Minimum |
| Molecules | 1 | 3 | 4 | 5 |
| in Blood | Positive | Positive | Positive | Positive |
| 150 | 22.1% | 57.7% | 35.3% | 18.5% |
| 200 | 28.1% | 76.2% | 56.7% | 37.1% |
| 240 | 33.0% | 85.7% | 70.6% | 52.4% |
| 300 | 39.4% | 93.8% | 84.9% | 71.5% |
| 400 | 48.8% | 98.6% | 95.8% | 90.0% |
| 480 | 55.1% | 99.6% | 98.6% | 96.2% |
| 600 | 63.2% | 99.9% | 99.8% | 99.2% |

TABLE 33
24 Markers Sensitivity;
Avg. Indiv. Mkr,: 66% Sensitivity

| | | 24 | 24 | 24 |
|---|---|---|---|---|
| Average | | markers, | markers, | markers, |
| Number of | Mutation, | Minimum | Minimum | Minimum |
| Molecules | 1 | 3 | 4 | 5 |
| in Blood | Positive | Positive | Positive | Positive |
| 150 | 22.1% | 76.2% | 56.7% | 37.1% |
| 200 | 28.1% | 89.8% | 77.5% | 61.0% |
| 240 | 33.0% | 95.4% | 88.1% | 76.5% |
| 300 | 39.4% | 98.6% | 95.8% | 90.0% |
| 400 | 48.8% | 99.8% | 99.3% | 98.0% |
| 480 | 55.1% | 100.0% | 99.9% | 99.6% |
| 600 | 63.2% | 100.0% | 100.0% | 100.0% |

TABLE 34
24 Marker Specificity

| | Minimum | Minimum | Minimum |
|---|---|---|---|
| Individual | 3 | 4 | 5 |
| marker FP | Markers | Markers | Markers |
| rate | Positive | Positive | Positive |
| 2% | 98.4% | 99.8% | 99.9% |
| 3% | 94.6% | 99.1% | 99.9% |
| 4% | 87.1% | 97.3% | 99.6% |
| 5% | | 93.4% | 98.7% |

TABLE 35
36 Marker Sensitivity;
Avg. Indiv. Mkr,: 50% Sensitivity

| | | 36 | 36 | 36 | 36 |
|---|---|---|---|---|---|
| Average | | markers, | markers, | markers, | markers, |
| Number of | Mutation, | Minimum | Minimum | Minimum | Minimum |
| Molecules | 1 | 3 | 4 | 5 | 6 |
| in Blood | Positive | Positive | Positive | Positive | Positive |
| 150 | 22.1% | 82.6% | 65.8% | 46.8% | 29.7% |
| 200 | 28.1% | 93.8% | 84.9% | 71.5% | 55.4% |
| 240 | 33.0% | 97.5% | 92.8% | 84.4% | 72.4% |
| 300 | 39.4% | 99.4% | 97.9% | 94.5% | 88.4% |
| 400 | 48.8% | 99.9% | 99.8% | 99.2% | 98.0% |
| 480 | 55.1% | 100.0% | 100.0% | 99.9% | 99.6% |
| 600 | 63.2% | 100.0% | 100.0% | 100.0% | 100.0% |

TABLE 36
36 Marker Sensitivity;
Avg. Indiv. Mkr,: 66% Sensitivity

| | | 36 | 36 | 36 | 36 |
|---|---|---|---|---|---|
| Average | | markers, | markers, | markers, | markers, |
| Number of | Mutation, | Minimum | Minimum | Minimum | Minimum |
| Molecules | 1 | 3 | 4 | 5 | 6 |
| in Blood | Positive | Positive | Positive | Positive | Positive |
| 150 | 22.1% | 93.8% | 84.9% | 71.5% | 55.4% |
| 200 | 28.1% | 98.6% | 95.8% | 90.0% | 80.9% |
| 240 | 33.0% | 99.6% | 98.6% | 96.2% | 91.6% |
| 300 | 39.4% | 99.9% | 99.8% | 99.2% | 98.0% |
| 400 | 48.8% | 100.0% | 100.0% | 100.0% | 99.9% |
| 480 | 55.1% | 100.0% | 100.0% | 100.0% | 100.0% |
| 600 | 63.2% | 100.0% | 100.0% | 100.0% | 100.0% |

TABLE 37
36 Marker Specificity

| | Minimum | Minimum | Minimum | Minimum |
|---|---|---|---|---|
| Individual | 3 | 4 | 5 | 6 |
| marker FP | Markers | Markers | Markers | Markers |
| rate | Positive | Positive | Positive | Positive |
| 2% | 94.3% | 99.1% | 99.9% | 100.0% |
| 3% | 80.7% | 95.2% | 99.1% | 99.9% |
| 4% | | 84.9% | 96.1% | 99.2% |
| 5% | | | 88.2% | 97.0% |

TABLE 38
48 Marker Sensitivity;
Avg. Indiv. Mkr,: 50% Sensitivity

| Average | | | | | | |
|---|---|---|---|---|---|---|
| Number of | | 48 markers, | 48 markers, | 48 markers, | 48 markers, | 48 markers, |
| Molecules | Mutation, 1 | Minimum 4 | Minimum 5 | Minimum 6 | Minimum 7 | Minimum 8 |
| in Blood | Positive | Positive | Positive | Positive | Positive | Positive |
| 150 | 22.1% | 84.9% | 71.6% | 55.6% | 39.6% | 25.8% |
| 200 | 28.1% | 95.8% | 90.1% | 80.9% | 68.7% | 54.8% |
| 240 | 33.0% | 99.1% | 97.2% | 93.4% | 87.1% | 78.1% |
| 300 | 39.4% | 99.8% | 99.3% | 98.1% | 95.6% | 92.3% |
| 400 | 48.8% | 99.9% | 99.9% | 99.8% | 99.7% | 99.1% |
| 480 | 55.1% | 99.9% | 99.9% | 99.9% | 99.9% | 99.9% |
| 600 | 63.2% | 99.9% | 99.9% | 99.9% | 99.9% | 99.9% |

TABLE 39
48 Marker Sensitivity;
Avg. Indiv. Mkr,: 65% Sensitivity

| Average | | | | | | |
|---|---|---|---|---|---|---|
| Number of | | 48 markers, | 48 markers, | 48 markers, | 48 markers, | 48 markers, |
| Molecules | Mutation, 1 | Minimum 4 | Minimum 5 | Minimum 6 | Minimum 7 | Minimum 8 |
| in Blood | Positive | Positive | Positive | Positive | Positive | Positive |
| 150 | 22.1% | 95.8% | 90.0% | 80.9% | 68.7% | 54.7% |
| 200 | 28.1% | 99.3% | 98.0% | 95.2% | 90.3% | 82.9% |
| 240 | 33.0% | 99.9% | 99.6% | 98.8% | 97.1% | 94.0% |
| 300 | 39.4% | 100.0% | 100.0% | 99.9% | 99.6% | 99.0% |
| 400 | 48.8% | 100.0% | 100.0% | 100.0% | 100.0% | 100.0% |
| 480 | 55.1% | 100.0% | 100.0% | 100.0% | 100.0% | 100.0% |
| 600 | 63.2% | 100.0% | 100.0% | 100.0% | 100.0% | 100.0% |

TABLE 40
48 Marker Specificity

| | Minimum | Minimum | Minimum | Minimum | Minimum |
|---|---|---|---|---|---|
| Individual | 4 | 5 | 6 | 7 | 8 |
| marker FP | Markers | Markers | Markers | Markers | Markers |
| rate | Positive | Positive | Positive | Positive | Positive |
| 2% | 96.9% | 99.4% | 99.9% | 99.9% | 99.9% |
| 3% | 84.3% | 95.8% | 99.1% | 99.8% | 99.9% |
| 4% | | 82.5% | 95.0% | 98.8% | 99.8% |
| 5% | | | | 94.3% | 98.6% |

[0328] The above tables, and FIGS. 51-53, as well as FIGS. 33-35, allow for a direct comparison in the overall improvement in sensitivity when the average individual marker sensitivity improves from 50% to 66%. In this example, if there is an average of 150 molecules in the blood for the earliest cancer (Stage I), and if that would cover at least one mutation, then the sensitivity for identifying such a cancer by next generation sequencing would be 22.1% (See any of the aforementioned figures). For 24 markers, with a minimum of 3 markers positive and a 3% FP rate, overall sensitivity improves from 57.7% to 76.2%, when the average individual marker sensitivity improves from 50% to 66%, for detecting Stage I cancer (at about 150 molecules of each positive marker in the blood, see FIGS. 33A and 51A, orange line). If the individual marker FP rate is 3%, then if there is a 3-marker minimum, then overall FP rate is 5.4% for 24 markers, for a specificity of 94.6% (See FIG. 33B or 51B). However, if the individual marker FP rate is 5%, then if there is a 4-marker minimum, then overall FP rate is 6.6% for 24 markers, for a specificity of 93.4% (See FIG. 33B). At 4 markers, for Stage I cancer (at about 150 molecules of each positive marker in the blood), overall sensitivity improves from 35.3% to 56.7%, when the average individual marker sensitivity improves from 50% to 66% (See FIG. 33A and FIG. 50A). For 36 markers, with a minimum of 3 markers positive and a 2% FP rate, overall sensitivity improves from 82.6% to 93.8%, when the average individual marker sensitivity improves from 50% to 66%, for detecting Stage I cancer (at about 150 molecules of each positive marker in the blood, see FIGS. 34A and 52A). If the individual marker FP rate is 2%, then if there is a 3-marker minimum, then overall FP rate is 5.7% for 36 markers, for a specificity of 94.3% (See FIG. 34B or 52B). However, if the individual marker FP rate is 3%, then the assay requires a 4-marker minimum, then overall FP rate is 4.8% for 36 markers, for a specificity of 95.2% (See FIG. 34B). At 4 markers, for Stage I cancer (at about 150 molecules of each positive marker in the blood), overall sensitivity improves from 65.8% to 84.9%, when the average individual marker sensitivity improves from 50% to 66% (See FIG. 34A and FIG. 51A). For 48 markers, with a minimum of 4 markers positive and a 2% FP rate, overall sensitivity improves from 84.9% to 95.8%, when the average individual marker sensitivity improves from 50% to 66%, for detecting Stage I cancer (at about 150 molecules of each positive marker in the blood, see FIGS. 35A and 52A). If the individual marker FP rate is 2%, then if there is a 4-marker minimum, then overall FP rate is 3.1% for 48 markers, for a specificity of 96.9% (See FIG. 35B or 52B). However, if the individual marker FP rate is 3%, then the assay requires a 5-marker minimum, then overall FP rate is 4.2% for 48 markers, for a specificity of 95.8% (See FIG. 35B). At 5 markers, for Stage I cancer (at about 150 molecules of each positive marker in the blood), overall sensitivity improves from 71.6% to 90.0%, when the average individual marker sensitivity improves from 50% to 66% (See FIG. 35A and FIG. 52A).

[0329] From the above charts, the receiver operating characteristic (ROC) curves may be calculated by plotting Sensitivity vs. 1-Specificity. Since these are theoretical calculations, the curves were generated for different levels of average marker false-positive rates of 2%, 3%, 4%, and 5%. The AUC values, calculated for ROC curves for 24 markers, with average individual marker at 66% Sensitivity with 2%-3% FP; 36 markers, with average individual marker at 66% Sensitivity with 2%-3% FP; and 48 markers, with average individual marker at 66% Sensitivity with 2%-3% FP; are provided in the Table below. Using the benchmark of an average of 150 molecules in the blood for the earliest cancer (Stage I), and looking only at the 3% individual marker FP rate AUC values are at 77% with 24 markers (average individual marker at 50% Sensitivity), improve to 87% with 24 markers (average individual marker at 66% Sensitivity); AUC values are at 87% with 36 markers (average individual marker at 50% Sensitivity), improve to 95% with 36 markers (average individual marker at 66% Sensitivity); and AUC values are at 89% with 48 markers (average individual marker at 50% Sensitivity), improve to 97% with 48 markers (average individual marker at 66% Sensitivity). These results illustrate that for multiple marker assays achieving good sensitivities and specificities for the earliest cancers is aided when the average individual marker sensitivity improves from 50% to 66%.

TABLE 41
24, 36, & 48 Marker AUC Values from ROC Curves;
Avg. Indiv. Mkr,: 66% Sensitivity

| Total | | | | | | | |
|---|---|---|---|---|---|---|---|
| Markers: | | | | | | | |
| Individual | | | | | | | |
| marker | 150 | 200 | 240 | 300 | 400 | 480 | 600 |
| FP rate | Molecules | Molecules | Molecules | Molecules | Molecules | Molecules | Molecules |
| 24 Mkrs: 2% | 88% | 95% | 98% | >99% | >99% | >99% | >99% |
| 24 Mkrs: 3% | 87% | 94% | 97% | 99% | >99% | >99% | >99% |
| 36 Mkrs: 2% | 96% | 99% | >99% | >99% | >99% | >99% | >99% |
| 36 Mkrs: 3% | 95% | 99% | >99% | >99% | >99% | >99% | >99% |
| 48 Mkrs: 2% | 98% | >99% | >99% | >99% | >99% | >99% | >99% |
| 48 Mkrs: 3% | 97% | 99% | >99% | >99% | >99% | >99% | >99% |

[0330] How would increasing the average individual marker sensitivity from 50% sensitivity to 66% sensitivity improve upon a one-step cancer assay? To review: the challenge is to screen 107 million adults in the U.S. over the age of 50 for colorectal cancer—of which there are about 135,000 new cases that are diagnosed a year. In this example, if there is an average of 300 molecules in the blood for early cancer (Stage I & II), and taking the best-case scenario of individual marker FP rate is 2%, then if there is a 3-marker minimum, then overall FP rate is 1.6% for 24 markers, for a specificity of 98.4% (See FIG. 33B or 50B). At 3 markers, for Stage I & II cancer (at about 300 molecules of each positive marker in the blood), for average marker sensitivity of 50%, the test would miss 6.2%; i.e. for Stage I & II cancer the overall sensitivity would be 93.8% (See FIG. 33A), e.g. the test would correctly identify 93.8% of individuals with disease, which would be 126,630 individuals (out of 135,000 new cases). At a specificity of 98.4%, for 107 million individuals screened, the test would also generate 1.6%×107,000,000=1,712,000 false positives. Thus, the positive predictive value would be 126,630/(126,630+1,712,000)=around 6.8%, in other words, only one in 14 individuals who tested positive would actually have colorectal cancer, the rest would be false-positives. At 3 markers, for Stage I & II cancer (at about 300 molecules of each positive marker in the blood), for average marker sensitivity of 66%, the test would miss 1.4%; i.e. for Stage I & II cancer the overall sensitivity would be 98.6% (See FIG. 50A), e.g. the test would correctly identify 98.6% of individuals with disease, which would be 133,110 individuals (out of 135,000 new cases). At a specificity of 98.4%, for 107 million individuals screened, the test would also generate 1.6%×107,000,000=1,712,000 false positives. Thus, the positive predictive value would be 133,110/(133,110+1,712,000)=around 7.2%, in other words, only one in 14 individuals who tested positive would actually have colorectal cancer, the rest would be false-positives. Thus, if the FP is low, i.e. 2%, then there is marginal benefit in going from an average marker sensitivity of 50% to an average marker sensitivity of 66%.

[0331] However, if the individual marker FP rate is more realistic, say 4%, then more markers will be required to achieve better than 98% specificity, and this will be at the cost of sensitivity. If individual marker FP rate is 4%, then if there is a 5-marker minimum, then overall FP rate is 0.4% for 24 markers, for a specificity of 99.6% (See FIG. 33B). At 5 markers, for Stage I & II cancer (at about 300 molecules of each positive marker in the blood), at an average marker sensitivity of 50%, the test would miss 28.5%; i.e. for Stage I & II cancer the overall sensitivity would be 71.5% (See FIG. 33A), e.g. the test would correctly identify 71.5% of individuals with disease, which would be 90,540 individuals (out of 135,000 new cases). At a specificity of 99.6%, for 107 million individuals screened, the test would also generate 0.4%×107,000,000=428,000 false positives. Thus, the positive predictive value would be 90,540/(90,540+428,000)=around 17.5%, in other words, one in 5.7 individuals who tested positive would actually have colorectal cancer, the rest would be false-positives. A PPV of 17.5% is quite respectable, however, it would be achieved at the cost of missing 28.5% of early cancer. At 3 markers, for Stage I & II cancer (at about 300 molecules of each positive marker in the blood), for average marker sensitivity of 66%, the test would miss 10.0%; i.e. for Stage I & II cancer the overall sensitivity would be 90.0% (See FIG. 50A), e.g. the test would correctly identify 90.0% of individuals with disease, which would be 121,500 individuals (out of 135,000 new cases). At a specificity of 99.6%, for 107 million individuals screened, the test would also generate 0.4%×107,000,000=428,000 false positives. Thus, the positive predictive value would be 121,500/(121,500+428,000)=around 22.1%, in other words, one in 4.5 individuals who tested positive would actually have colorectal cancer, the rest would be false-positives. A PPV of 22.1% is excellent, and further, it would be achieved at the cost of missing only 10% of early cancer. Thus, if the FP is more realistic i.e. 4%, then there is a significant benefit in going from an average marker sensitivity of 50% to an average marker sensitivity of 66%.

[0332] Returning to the example of colorectal cancer, in particular the cases of microsatellite stable tumors (MSS) where the mutation load is low, for these calculations when relying on NGS sequencing alone (assuming 150 molecules with one mutation in the blood), an estimated 78% of early colorectal cancer would be missed. Again, to put these number in perspective, in the U.S., about 135,000 new cases of colorectal cancer were diagnosed in 2018, of which about 60% is late cancer (i.e. Stage III & IV). About 107 million individuals in the U.S. are over the age of 50 and should be tested for colorectal cancer. While it cannot be predicted how many individuals have a hidden cancer (i.e. Stage I) within them, who are non-compliant to testing, for the purposes of this calculation, assume that the average late cancer was once the average early cancer, and thus individuals with Stage I cancer would be about 40,500 individuals. With the assumption of these samples containing at least 150 molecules with one mutation in the blood, such a test would find 8,910 individuals (out of 40,500 individuals with Stage I cancer) with colorectal cancer. However, with a specificity for sequencing at 98%, there would be about 2.1 million false-positives. The positive predictive value of such a test would be around 0.4%, in other words, only one in 236 individuals who tested positive would actually have Stage I colorectal cancer, the rest would be false-positives. In contrast, consider the two-step methylation marker test described above, wherein the first step has 24 methylation markers specific to GI cancers, while the second step has 48 methylation markers specific to colorectal cancer. In this example, the average individual marker sensitivity is set at 66%. In this example, as above, the calculations are done with the anticipation of an average of 150 methylated molecules per positive marker in the blood. Assuming individual marker false-positive rates of 3%, and with the first step requiring a minimum of 3 markers positive, then with an overall specificity of 94.6%, the first step would identify 5,778,000 individuals (out of 107,000,000 total adults over 50 in the U.S.) which would include at 76.2% sensitivity or about 30,861 individuals with Stage I colorectal cancer (out of 40,500 individuals with Stage I cancer). However, those 5,778,000 presumptive positive individuals would be evaluated in the second step of 48 markers requiring a minimum of 5 markers positive, then the two-step test would identify 76.2%×90.0%=68.6%=27,775 individuals (out of 40,500 individuals with Stage I cancer) with colorectal cancer. With a specificity of 95.8%, the second test would also generate 5,778,000×4.2%=242,676 false-positives. The positive predictive value of such a test would be 27,775/270,451=10.3%, in other words, 1 in 10 individuals who tested positive would actually have Stage I colorectal cancer, an extraordinarily successful screen to focus on those patients who would most benefit from follow-up colonoscopy. Since >90% of individuals identified with Stage I colon cancer have long-term survival after just surgery, the benefit in lives saved would be of incalculable value.

[0333] How would the above numbers change if the initial test in the two-step assay uses 36 markers? In this example, as above, the calculations are done with the anticipation of an average of 150 methylated molecules per positive marker in the blood. Assuming individual marker false-positive rates of 3%, and with the first step requiring a minimum of 4 markers positive, then with an overall specificity of 95.2%, the first step would identify 5,136,000 individuals (out of 107,000,000 total adults over 50 in the U.S.) which would include at 84.9% sensitivity or about 34,385 individuals with Stage I colorectal cancer (out of 40,500 individuals with Stage I cancer). However, those 5,136,000 presumptive positive individuals would be evaluated in the second step of 48 markers requiring a minimum of 5 markers positive, then the two-step test would identify 84.9%×90.0%=76.4%=30,946 individuals (out of 40,500 individuals with Stage I cancer) with colorectal cancer. With a specificity of 95.8%, the second test would also generate 5,136,000×4.2%=215,712 false-positives. The positive predictive value of such a test would be 30,946/246,658=12.5%, in other words, 1 in 8 individuals who tested positive would actually have Stage I colorectal cancer. In reality, one would need to also include the success for identifying Stage 2 and higher cancers. In expanding this example, the calculations are done with the anticipation that Stage I CRC has an average of 150 methylated molecules per positive marker in the blood, Stage II CRC has an average of 200 methylated molecules per positive marker, and the higher stages (III & IV) have at least an average of 300 methylated molecules per positive marker, and the higher stages. Also, to be consistent with the idea that as the test is used repeatedly, more of early and less of late CRC will be detected, then an estimate of 40,500 individuals with Stage I cancer, 40,500 individuals with Stage II cancer, and the remaining 54,000 individuals have late-stage cancer=135,000 total individuals with colorectal cancer identified per year in the U.S. The above calculation already provided the false-positive rate for the early cancer. For Stage II cancer, 95.8% would be identified in the first step, of which 95.8%×98.0%=93.9%=38,023 individuals with Stage II cancer would be verified in the second step. For Stage III and IV cancer, 99.8% would be identified in the first step, of which 99.8%×(100%)=53,892 individuals with late cancer would be identified. This brings the total identified at 30,946+38,023+53,892=122,861 individuals out of 135,000 with colorectal cancer. Overall, the positive predictive value of such a test would be 122,861/369,519=33.2%, in other words, 1 in 3 individuals who tested positive would actually have colorectal cancer, and this test would identify 68,969/81,000 or 85% of those individuals with early cancer—which would be unprecedented in diagnostic approaches to detect early cancer.

[0334] The ultimate goal is to develop a high-throughput scalable test to detect the majority of cancers that occur worldwide. The solid tumor cancers have been grouped into the following subclasses, as listed below in Tables 42, 43, and 44 for both sexes, for men, and for women.

TABLE 42
Global cancer incidence; Both Sexes
(Numbers in thousands; most common cancers
have incidence above 100,000 per year)

| | Incidence | % Group | % total All | (Total) |
|---|---|---|---|---|
| Group 1: | | | | |
| Colorectal (1,801) | 1801 | 52.9% | 12.9% | 13981 |
| Stomach (1,033) | 1033 | 30.3% | 7.4% | 13981 |
| Esophagus (572) | 572 | 16.8% | 4.1% | 13981 |
| Total, Group 1: | 3406 | | | |
| Group 2: | | | | |
| Breast (2,089) | 2089 | 62.6% | 14.9% | 13981 |
| Endometrial & Cervical | 570 | 17.1% | 4.1% | 13981 |
| (570) | | | | |
| Uterine (382) | 382 | 11.5% | 2.7% | 13981 |
| Ovarian (295) | 295 | 8.8% | 2.1% | 13981 |
| Total, Group 2: | 3336 | | | |
| Group 3: | | | | |
| Lung (2,093) | 2093 | 59.9% | 15.0% | 13981 |
| Head & Neck (832) | 832 | 23.8% | 6.0% | 13981 |
| Thyroid (567) | 567 | 16.2% | 4.1% | 13981 |
| Total, Group 3: | 3492 | | | |
| Group 4: | | | | |
| Prostate (1,276) | 1276 | 57.3% | 9.1% | 13981 |
| Bladder (549) | 549 | 24.6% | 3.9% | 13981 |
| Kidney (403) | 403 | 18.1% | 2.9% | 13981 |
| Total, Group 4: | 2228 | | | |
| Group 5: | | | | |
| Liver (841) | 841 | 55.4% | 6.0% | 13981 |
| Pancreas (459) | 459 | 30.2% | 3.3% | 13981 |
| Gallbladder (219) | 219 | 14.4% | 1.6% | 13981 |
| Total, Group 5: | 1519 | | | |
| Total | 13981 | | | |

TABLE 43
Global cancer incidence; Male
(Numbers in thousands; most common cancers
have incidence above 100,000 per year)

| | Incidence | % Group | % total All | (Total) |
|---|---|---|---|---|
| Group 1: | | | | |
| Colorectal (1,801) | 1006 | 48.2% | 14.1% | 7114 |
| Stomach (1,033) | 683 | 32.7% | 9.6% | 7114 |
| Esophagus (572) | 400 | 19.1% | 5.6% | 7114 |
| Total, Group 1: | 2089 | | | |
| Group 2: | | | | |
| Breast (2,089) | | | | |
| Endometrial & Cervical | | | | |
| (570) | | | | |
| Uterine (382) | | | | |
| Ovarian (295) | | | | |
| Total, Group 2: | | | | |
| Group 3: | | | | |
| Lung (2,093) | 1368 | 64.1% | 19.2% | 7114 |
| Head & Neck (832) | 635 | 29.8% | 8.9% | 7114 |
| Thyroid (567) | 131 | 6.1% | 1.8% | 7114 |
| Total, Group 3: | 2134 | | | |
| Group 4: | | | | |
| Prostate (1,276) | 1276 | 65.3% | 17.9% | 7114 |
| Bladder (549) | 424 | 21.7% | 6.0% | 7114 |
| Kidney (403) | 254 | 13.0% | 3.6% | 7114 |
| Total, Group 4: | 1954 | | | |
| Group 5: | | | | |
| Liver (841) | 597 | 63.7% | 8.4% | 7114 |
| Pancreas (459) | 243 | 25.9% | 3.4% | 7114 |
| Gallbladder (219) | 97 | 10.4% | 1.4% | 7114 |
| Total, Group 5: | 937 | | | |
| Total | 7114 | | | |

TABLE 44
Global cancer incidence; Female
(Numbers in thousands; most common cancers
have incidence above 100,000 per year)

| | Incidence | % Group | % total All | (Total) |
|---|---|---|---|---|
| Group 1: | | | | |
| Colorectal (1,801) | 795 | 60.4% | 11.5% | 6930 |
| Stomach (1,033) | 350 | 26.6% | 5.1% | 6930 |
| Esophagus (572) | 172 | 13.1% | 2.5% | 6930 |
| Total, Group 1: | 1317 | | | |
| Group 2: | | | | |
| Breast (2,089) | 2089 | 62.6% | 30.1% | 6930 |
| Endometrial & Cervical | 570 | 17.1% | 8.2% | 6930 |
| (570) | | | | |
| Uterine (382) | 382 | 11.5% | 5.5% | 6930 |
| Ovarian (295) | 295 | 8.8% | 4.3% | 6930 |
| Total, Group 2: | 3336 | | | |
| Group 3: | | | | |
| Lung (2,093) | 725 | 53.4% | 10.5% | 6930 |
| Head & Neck (832) | 196 | 14.4% | 2.8% | 6930 |
| Thyroid (567) | 436 | 32.1% | 6.3% | 6930 |
| Total, Group 3: | 1357 | | | |
| Group 4: | | | | |
| Prostate (1,276) | 0 | 0.0% | 0.0% | 6930 |
| Bladder (549) | 216 | 63.9% | 3.1% | 6930 |
| Kidney (403) | 122 | 36.1% | 1.8% | 6930 |
| Total, Group 4: | 338 | | | |
| Group 5: | | | | |
| Liver (841) | 244 | 41.9% | 3.5% | 6930 |
| Pancreas (459) | 216 | 37.1% | 3.1% | 6930 |
| Gallbladder (219) | 122 | 21.0% | 1.8% | 6930 |
| Total, Group 5: | 582 | | | |
| Total | 6930 | | | |

[0335] The above list does not include liquid cancers, nor some of the less common solid tumors. Worldwide incidence (numbers in thousands) of liquid tumors include Non-Hodgkin lymphoma (225), leukemia (187), multiple myeloma (70), and Hodgkin lymphoma (33). These would be detected in a separate test not discussed herein. Further, the list excludes melanoma (287) and brain tumors (134). Testing for these would be done with separate sets of markers, optimized as described above for colorectal cancer. In addition, while some cancers listed in the tables above are of extreme medical importance (e.g., mesothelioma, thyroid cancer, and the three different subcategories of kidney cancer), their biology is sufficiently different as to usually merit a separate set of markers, again, optimized as described above for colorectal cancer.

[0336] Thus, for the present application, a Pan-Oncology test is developed that would include the following major cancers by the following groupings: Group 1 (colorectal, stomach, and esophagus); Group 2 (breast, endometrial, ovarian, cervical, and uterine); Group 3 (lung and head & neck); Group 4 (prostate and bladder); and Group 5 (liver, pancreatic, or gall bladder). Note that some cancers within Group 3 may be tested as a sputum sample, and cancers in Group 4 may be tested as a urine sample.

[0337] Careful analysis of the TCGA methylation database revealed a general commonality in methylation patterns among cancers within these 5 separate groups. Further, there are some methylation markers that are common among several cancers, while absent in normal white blood cells. The following strategy was used to design a multi-step pan-oncology test.

[0338] The first step is to identify markers that cover multiple cancers in one or more of the above groups. The markers should be sufficiently diverse as to cover cancers in all 5 groups. For example, a first step of the assay would use a set of 96 markers that on average comprise of at least 36 markers with 50% sensitivity that covers each of the aforementioned 16 types of solid tumors (covered in the 5 Groups; see FIG. 1E; for 66% sensitivity, see FIG. 1C). If at least 5 markers are positive, the assay would then move to a second step that would be used to verify the initial results and identify the most probable tissue of origin. In most cases, more than 5 markers would be positive, and then pattern of distribution of these methylation markers would guide the choice of which groups to test in the second step. The second step of the assay would test, on average, 2 or more sets of the group-specific markers. For example, the second step of the assay would use 2 or more sets of 64 group-specific markers that, on average, comprise of at least 36 markers with 50% sensitivity that covers each of the aforementioned types of solid tumors that may be present in that group (for 66% sensitivity, see FIG. 1D). By scoring the markers that are positive and comparing to predicted positives for each cancer type within the group tested, the physician can identify the most probable tissue of origin, and subsequently send the patient to the appropriate imaging.

[0339] A close evaluation of the TCGA database reveals pan-oncology markers that meet the criteria for use in a set of 96 markers that on average comprise of at least 36 markers with 50% sensitivity that covers each of the aforementioned 16 types of solid tumors. These pan-oncology markers include but are not limited to cancer-specific microRNA markers, cancer-specific ncRNA and lncRNA markers, cancer-specific exon transcripts, tumor-associated antigens, cancer protein markers, protein markers that can be secreted by solid tumors into the blood, common mutations, primary CpG sites that are solid tumor and tissue specific markers, chromosomal regions or sub-regions within which are primary CpG sites that are solid tumor and tissue specific markers, and primary and flanking CpG sites that are solid tumor and tissue specific markers. Methods for detecting said markers have been discussed supra, and these markers are listed below and in accompanying figures.

[0340] Blood-based, solid tumor-specific microRNA markers derived through analysis of TCGA microRNA datasets, includes, but is not limited to, the following markers: (mir ID, Gene ID); hsa-mir-21, MIR21; hsa-mir-182, MIR182; hsa-mir-454, MIR454; hsa-mir-96, MIR96; hsa-mir-183, MIR183; hsa-mir-549, MIR549; hsa-mir-301^{a}, MIR301A; hsa-mir-548f-1, MIR548F1; hsa-mir-301b, MIR301B; hsa-mir-103-1, MIR1031; hsa-mir-18^{a}, MIR18A; hsa-mir-147b, MIR147B; hsa-mir-4326, MIR4326; and hsa-mir-573, MIR573 These markers may be present in exosomes, tumor-associated vesicles, Argonaute complexes, or other protected states in the blood.

[0341] FIG. 53 provides a list of blood-based, solid tumor-specific ncRNA and lncRNA markers derived through analysis of various publicly available Affymetrix Exon ST CEL data, which were aligned to GENCODE annotations to generate ncRNA and lncRNA transcriptome datasets. Comparative analyses across these datasets (various cancer types, along with normal tissues, and peripheral blood) were conducted to generate the ncRNA and lncRNA markers list. Such lncRNA and ncRNA may be enriched in exosomes or other protected states in the blood.

[0342] In addition, FIG. 54 provides a list of blood-based solid tumor-specific exon transcripts that may be enriched in exosomes, tumor-associated vesicles, or other protected states in the blood. Overexpressed oncogene transcripts, or transcripts of mutant oncogenes may be enriched in exosomes, as they may drive spread of the cancer.

[0343] FIG. 55 provides a list of cancer protein markers, identified through mRNA sequences, protein expression levels, protein product concentrations, cytokines, or autoantibody to the protein product arising from solid tumors, which may be identified in the blood, either within exosomes, other protected states, tumor-associated vesicles, or free within the plasma.

[0344] Protein markers that can be secreted by solid tumors into the blood include, but are not limited to: (Protein name, UniProt ID); Uncharacterized protein C19orf48, Q6RUI8; Protein FAM72B, Q86X60; Protein FAM72D, Q6L9T8; Hydroxyacylglutathione hydrolase-like protein, Q6PII5; Putative methyltransferase NSUN5, Q96P11; RNA pseudouridylate synthase domain-containing protein 1, Q9UJJ7; Collagen triple helix repeat-containing protein 1, Q96CG8; Interleukin-11, P20809; Stromelysin-2, P09238; Matrix metalloproteinase-9, P14780; Podocan-like protein 1, Q6PEZ8; Putative peptide YY-2, Q9NRI6; Osteopontin, P10451; Sulfhydryl oxidase 2, Q6ZRP7; Glypican-2, Q8N158; Macrophage migration inhibitory factor, P14174; Peptidyl-prolyl cis-trans isomerase A, P62937; Calreticulin, P27797. A comparative analysis was performed across various TCGA datasets (tumors, normals), followed by an additional bioinformatics filter (Meinken et al., “Computational Prediction of Protein Subcellular Locations in Eukaryotes: an Experience Report,” Computational Molecular Biology 2(1):1-7 (2012), which is hereby incorporated by reference in its entirety), which predicts the likelihood that the translated protein is secreted by the cells.

[0345] The distribution of mutations in solid tumors are available in the public COSMIC database, with the commonly altered genes across solid tumors listed as: TP53 (tumor protein p53), TTN (titin), MUC16 (mucin 16), and KRAS (Ki-ras2 Kirsten rat sarcoma viral oncogene homolog).

[0346] A deep analysis of the TCGA database of methylation markers that are absent in blood but on average are present in solid tumor types at 50% sensitivity show three general categories of clusters: (i) Markers that are present in colorectal cancers, and related GI cancer (stomach & esophagus), (ii) Markers that are present in colorectal cancers, and related GI cancer (stomach & esophagus), as well as other tumors, and (iii) Markers that are mostly absent in colorectal cancers, but present in other tumors. Second, while for some tumor types one could readily identify markers that were unique to that group, such as Group 2 (breast, endometrial, ovarian, cervical, and uterine), for other tumor types such as lung cancer or pancreatic cancer, it was difficult to identify methylation markers that were unique to that cancer. Consequently, to assemble a set of 96 markers that satisfied the criteria of at least 36 markers with 50% sensitivity that covers each of the aforementioned 16 types of solid tumors, the first 48 markers comprised of about 12 markers that were strongly represented in Group 2 tumors, about 12 markers that were strongly represented in Group 3 tumors, about 12 markers that were strongly represented in Group 4 tumors, and about 12 markers that were strongly represented in Group 5 tumors. The remaining 48 markers comprised of about 12 markers that were strongly represented in Groups 1 & 2 tumors, about 12 markers that were strongly represented in Groups 1 & 3 tumors, about 12 markers that were strongly represented in Groups 1 & 4 tumors, and about 12 markers that were strongly represented in Groups 1 & 5 tumors.

[0347] FIG. 56 provides a list of primary CpG sites that are solid tumors and tissue-specific markers, that may be used to identify the presence of solid tumors from cfDNA, DNA within exosomes, or DNA in other protected states (such as within CTCs) within the blood. FIG. 57 provides a list of chromosomal regions or sub-regions within which are primary CpG sites that are solid tumors and tissue-specific markers, that may be used to identify the presence of solid tumors from cfDNA, DNA within exosomes, or DNA in other protected states (such as within CTCs) within the blood. These lists contain preferred primary CpG sites and their flanking sites, as well as alternative markers that are low to no-CRC, and alternative markers that are high is CRC, with or without being high for other cancers as well. Primer sets for exemplary preferred and alternate methylation markers are listed in Table 46 in the experimental section.

[0348] Table 47, in the experimental section, provides simulations of the 96-marker assay, with average sensitivities of 50%, for identifying most probably group for tissue of origin, for both sexes. A set of 96 markers was assembled as above and the percentage of samples positive within each of the cancer patients in the TCGA and GEO databases was assessed. The total number of patients for each cancer analyzed are: Group 1 (colorectal, CRC-PT=395; stomach, ST-Pt=260; esophagus, ES-Pt=185); Group 2 (breast, BR-Pt=668; endometrial, END-Pt=431; ovarian, OV-Pt=79; cervical, CERV-Pt=307; uterine, UTCS-Pt=57); Group 3 (lung adenocarcinoma, LUAD=450; lung squamous cell carcinoma, LUSC=372; head & neck, HNSC-Pt=528); Group 4 (prostate, PROS-Pt=192; bladder, BLAD-Pt=412); and Group 5 (liver, LIV-Pt=377; pancreatic, PANC-Pt=184; and gall bladder, BILE-Pt=36). The columns reflect the total percent patients positive for each of the markers divided by the total number of markers used—for the first row of all cancers, that would be 96 markers. Thus, on average, of the 96 markers chosen, the number of average sensitivity scores are: Group 1 (colorectal=44, stomach=45, esophagus=40); Group 2 (breast=38, endometrial=40, ovarian=22, cervical=39, uterine=33); Group 3 (lung adenocarcinoma=31, lung squamous cell carcinoma=31, head & neck=33); Group 4 (prostate=45, bladder=36); and Group 5 (liver=38, pancreatic=27, gall bladder=47). This translates into the following number of marker equivalents with average sensitivities of 50% (=96×score/50); (colorectal=85 marker equivalents; stomach=86 marker equivalents; esophagus=78 marker equivalents); Group 2 (breast=74 marker equivalents; endometrial=76 marker equivalents; ovarian=42 marker equivalents; cervical=75 marker equivalents; uterine=64 marker equivalents); Group 3 (lung adenocarcinoma=60 marker equivalents; lung squamous cell carcinoma=59 marker equivalents; head & neck=64 marker equivalents); Group 4 (prostate=86 marker equivalents; bladder=70 marker equivalents); and Group 5 (liver=74 marker equivalents; pancreatic=51 marker equivalents; gall bladder=91 marker equivalents). Thus, cancers were well represented, ranging from 42 to 91 marker equivalents for the different cancer types, and all well above the minimum of 36 markers with average sensitivities of 50%.

[0349] The above numbers translate into the following number of marker equivalents with average sensitivities of 66% (=96×score/66); (colorectal=65 marker equivalents; stomach=65 marker equivalents; esophagus=59 marker equivalents); Group 2 (breast=56 marker equivalents; endometrial=58 marker equivalents; ovarian=32 marker equivalents; cervical=57 marker equivalents; uterine=48 marker equivalents); Group 3 (lung adenocarcinoma=45 marker equivalents; lung squamous cell carcinoma=45 marker equivalents; head & neck=48 marker equivalents); Group 4 (prostate=65 marker equivalents; bladder=53 marker equivalents); and Group 5 (liver=56 marker equivalents; pancreatic=39 marker equivalents; gall bladder=69 marker equivalents). Thus, cancers were well represented, ranging from 32 to 69 marker equivalents for the different cancer types, and with the exception of ovarian cancer at 32, the other cancer types are above the minimum of 36 markers with average sensitivities of 66%.

[0350] The aforementioned markers were then re-ordered for each of the above cancer types such that the most prevalent markers were listed first. For example, with CRC, of the 96 markers, 54 markers gave scores above 55 (i.e. were positive in greater than 55% of the 395 patients) and 9 gave scores of between 25 and 54 (i.e. were positive for from 25% to 54% of the 395 patients). Half of the higher, and a third of the lower set, for a total of 30 markers were distributed into two marker test sets, designated “CRC1” and “CRC2” (Table 47, rows 2 & 3). These marker sets would reflect an ideal result if half the markers with the potential to be positive are detected in the assay. This does not account for the chances that earlier stage tumors would have a lower number of marker molecules in the plasma, and thus consequently the actual number of markers positive would be less than the ideal result in this simulation. The percent of patients positive for each of the cancers were recorded and then divided by the total number of markers used for that cancer type. As anticipated, when selecting markers for a given tumor type, those markers should give a higher score than the average, i.e. 66 for CRC in each of the two sets of selected 30 markers, compared with a score of 44 for the unselected 96 markers. These markers form a diagonal across Table 47 and are highlighted in bold and light grey background.

[0351] For each column, marker sets that are in the same range or higher than the number of positive markers for that cancer type are also shown with a light grey background. For example, a patient with colorectal, stomach, or esophageal cancer will be scored as potentially positive with stomach cancer. This makes sense as the markers for these three cancers ovelap (i.e., they all bin to Group 1). They could be distinguished in step 2 of the assay on the group 1 markers, where these markers are more cancer types specific and tease out the most probable cancer type. Evaluation of the ST-Pt column shows that simulations for one of the two LUAD, BLAD, and both PANC also gave scores that might be interpreted as stomach cancer. Thus, the first step is not always able to pinpoint what Groups should be tested in the second step of the assay. However, most of the ambiguity is within group members (i.e. Group 2), and this makes sense, since the markers were chosen to maximize the ability to chose which groups to test in the second step.

[0352] Tables 48 and 49 (see prophetic experimental section) takes the aforementioned results in the simulations in Table 47 and multiplies them by the percent incidence of the given cancer type for that gender (see tables 37 and 38 respectively), and the result is adjusted to the same order of magnitude (multiple by 10). The concept is for the physician to take into account that a lower score for a high incidence cancer (such as CRC) may be a more common tissue of origin for a higher score for a low incidence cancer (such as lung squamous cell carcinoma). Tables 48 and 49 show the level of ambiguity in identifying tissue of origin is higher among female patients than among male patients, as indicated by the number of cells highlighted in grey that are not on the diagonal. In all cases, the physician will need to incorporate all data, such as smoking history, and not just molecular data to determine the most likely tissue of origin before sending the patient to confirmatory imaging.

[0353] Tables 50, 51, and 52 (see prophetic experimental section) takes the aforementioned results in the simulations in Tables 47, 48, and 49 and determines the percent deviation from the neutral result by taking the percentage of (=score specific cancer type simulation/score all cancer for that type−1). Thus, the first row of each of these tables should be 0%. Again, those percentages that are higher than, or in the same range as, the percentages across the diagonal are highlighted in light gray. While this set of marker selection may be less than ideal for distinguishing esophageal or gall bladder cancers as the tissue of origin, they are nevertheless quite informative for guiding the physician to which groups of the Step 2 assays should be tested. This simple scoring may be augmented by using AI approaches based on a database of results with clinical samples using the aforementioned 96-marker set.

[0354] For the second step of the assay, one, two, or more of the following groups will be tested, each group with a set of 64 markers that on average comprise of at least 36 markers with 50% sensitivity that covers each of the aforementioned 16 types of solid tumors in the following groups: Group 1 (colorectal, stomach, and esophagus); Group 2 (breast, endometrial, ovarian, cervical, and uterine); Group 3 (lung and head & neck); Group 4 (prostate and bladder); and Group 5 (liver, pancreatic, or gall bladder). These Group-specific and cancer type-specific markers include, but are not limited to, cancer-specific microRNA markers, cancer-specific ncRNA and lncRNA markers, cancer-specific exon transcripts, tumor-associated antigens, cancer protein markers, protein markers that can be secreted by solid tumors into the blood, common mutations, primary CpG sites that are solid tumor and tissue specific markers, chromosomal regions or sub-regions within which are primary CpG sites that are solid tumor and tissue specific markers, and primary and flanking CpG sites that are solid tumor and tissue specific markers. Methods for detecting said markers have been discussed supra, and listing of these markers are described for each of the groups below as well as in the corresponding figures.

[0355] Group 1 (colorectal, stomach, and esophagus): Blood-based, colorectal, stomach, and esophageal cancer-specific microRNA markers that may be used to distinguish group 1 from other groups include, but are not limited to: (mir ID, Gene ID): hsa-mir-624, MIR624. This miRNA was identified through analysis of TCGA microRNA datasets, and may be present in exosomes, tumor-associated vesicles, Argonaute complexes, or other protected states in the blood.

[0356] Blood-based, colorectal, stomach, and esophageal cancer-specific ncRNA and lncRNA markers that may be used to distinguish group 1 from other groups include, but are not limited to: [Gene ID, Coordinate (GRCh38)], ENSEMBL ID: LINC01558, chr6:167784537-167796859, ENSG00000146521.8. This ncRNA was identified through comparative analysis of various publicly available Affymetrix Exon ST CEL data, which were aligned to GENCODE annotations to generate ncRNA and lncRNA transcriptome datasets. Such lncRNA and ncRNA may be enriched in exosomes or other protected states in the blood.

[0357] In addition, FIG. 58 provides a list of blood-based colorectal, stomach, and esophageal cancer-specific exon transcripts that may be enriched in exosomes, tumor-associated vesicles, or other protected states in the blood.

[0358] Colorectal, stomach, and esophageal cancer protein encoding markers that may be used to distinguish group 1 from other groups include, but are not limited to: (Gene Symbol, Chromosome Band, Gene Title, UniProt ID): SELE, 1q22-q25, selectin E, P16581; OTUD4, 4q31.21, OTU domain containing 4, Q01804; BPI, 20q11.23, bactericidal/permeability-increasing protein, P17213; ASB4, 7q21-q22, ankyrin repeat and SOCS box containing 4, Q9Y574; C6orf123, 6q27, chromosome 6 open reading frame 123, Q9Y6Z2; KPNA3, 13q14.3, karyopherin alpha 3 (importin alpha 4), O00505; NUP98, 11p15, nucleoporin 98 kDa, P52948, identified through mRNA sequences, protein expression levels, protein product concentrations, cytokines, or autoantibody to the protein product arising from colorectal, stomach, and esophageal cancers, which may be identified in the blood, either within exosomes, other protected states, tumor-associated vesicles, or free within the plasma.

[0359] Protein markers that can be secreted by colorectal, stomach, and esophageal cancer into the blood, and may be used to distinguish group 1 from other groups include, but are not limited to: (Protein name, UniProt ID); Bactericidal permeability-increasing protein (BPI) (CAP 57), P1721. A comparative analysis was performed across various TCGA datasets (tumors, normals), followed by an additional bioinformatics filter (Meinken et al., “Computational Prediction of Protein Subcellular Locations in Eukaryotes: an Experience Report,” Computational Molecular Biology 2(1):1-7 (2012), which is hereby incorporated by reference in its entirety), which predicts the likelihood that the translated protein is secreted by the cells.

[0360] The distribution of mutations in colorectal, stomach, and esophageal cancer are available in the public COSMIC database, with the most common being: APC (APC regulator of WNT signaling pathway), ATM (ATM serine/threonine kinase), CSMD1 (CUB and Sushi multiple domains 1), DNAH11 (dynein axonemal heavy chain 11), DST (dystonin), EP400 (E1A binding protein p400), FAT3 (FAT atypical cadherin 3), FAT4 (FAT atypical cadherin 4), FLG (filaggrin), GLI3 (GLI family zinc finger 3), KRAS (Ki-ras2 Kirsten rat sarcoma viral oncogene homolog), LRP1B (LDL receptor related protein 1B), MUC16 (mucin 16, cell surface associated), OBSCN (obscurin, cytoskeletal calmodulin and titin-interacting RhoGEF), PCLO (piccolo presynaptic cytomatrix protein), PIK3CA (phosphatidylinositol-4,5-bisphosphate 3-kinase catalytic subunit alpha), RYR2 (ryanodine receptor 2), SYNE1 (spectrin repeat containing nuclear envelope protein 1), TP53 (tumor protein p53), TTN (titin), and UNC13C (unc-13 homolog C).

[0361] FIG. 59 provides a list of primary CpG sites that are colorectal, stomach, and esophageal cancer and tissue-specific markers, that may be used to identify the presence of colorectal, stomach, and esophageal cancer from cfDNA, DNA within exosomes, or DNA in other protected states (such as within CTCs) within the blood. FIG. 60 provides a list of chromosomal regions or sub-regions within which are primary CpG sites that are colorectal, stomach, and esophageal cancer and tissue-specific markers, that may be used to identify the presence of colorectal, stomach, and esophageal cancer from cfDNA, DNA within exosomes, or DNA in other protected states (such as within CTCs) within the blood. These lists contain preferred primary CpG sites and their flanking sites, as well as alternative markers that are high in CRC, and alternative markers that are low to no-CRC, but high in stomach and/or esophageal cancers. Primer sets for exemplary preferred and alternate methylation markers are listed in Table 53 in the experimental section. A selection of 64 of these markers with average sensitivities of 50% gave the following scores for Group 1: (colorectal=48, stomach=51, esophagus=43), which would translate into the following number of marker equivalents with average sensitivities of 50% (=64×score/50); (colorectal=62 marker equivalents; stomach=65 marker equivalents; esophagus=55 marker equivalents) and thus all were well above the average 36-marker equivalents minimum. The marker equivalents with average sensitivities of 66% gave the following scores (=64×score/66); (colorectal=47 marker equivalents; stomach=50 marker equivalents; esophagus=42 marker equivalents). Thus, all were well above the average 36-marker equivalents minimum.

[0362] Group 2 (breast, endometrial, ovarian, cervical, and uterine): Blood-based, breast, endometrial, ovarian, cervical, and uterine cancer-specific microRNA markers that may be used to distinguish group 2 from other groups include, but are not limited to: (mir ID, Gene ID): hsa-mir-1265, MIR1265. This marker was identified through analysis of TCGA microRNA datasets, which may be present in exosomes, tumor-associated vesicles, Argonaute complexes, or other protected states in the blood.

[0363] Blood-based breast, endometrial, ovarian, cervical, and uterine cancer-specific exon transcripts that may be used to distinguish group 2 from other groups include, but are not limited to: (mir ID, Gene ID): hsa-mir-1265, MIR1265. This marker was identified through analysis of TCGA microRNA datasets, which may be present in exosomes, tumor-associated vesicles, Argonaute complexes, or other protected states in the blood.

[0364] Breast, endometrial, ovarian, cervical, and uterine cancer protein markers that may be used to distinguish group 2 from other groups include, but are not limited to: (Gene Symbol, Chromosome Band, Gene Title, UniProt ID): RSPO2, 8q23.1, R-spondin 2, Q6UXX9; KLC4, 6p21.1, kinesin light chain 4, Q9NSK0; GLRX, 5q14, glutaredoxin (thioltransferase), P35754. These markers may be identified through mRNA sequences, protein expression levels, protein product concentrations, cytokines, or autoantibody to the protein product arising from breast, endometrial, ovarian, cervical, and uterine cancers, which may be identified in the blood, either within exosomes, other protected states, tumor-associated vesicles, or free within the plasma.

[0365] Protein markers that can be secreted by breast, endometrial, ovarian, cervical, and uterine cancer into the blood that may be used to distinguish group 2 from other groups include, but are not limited to: (Protein name, UniProt ID); R-spondin-2 (Roof plate-specific spondin-2) (hRspo2), Q6UXX9. A comparative analysis was performed across various TCGA datasets (tumors, normals), followed by an additional bioinformatics filter (Meinken et al., 2012, as described above), which predicts the likelihood that the translated protein is secreted by the cells.

[0366] The distribution of mutations in breast, endometrial, ovarian, cervical, and uterine cancer are available in the public COSMIC database, with the most common being: PIK3CA (phosphatidylinositol-4,5-bisphosphate 3-kinase catalytic subunit alpha), and TTN (titin).

[0367] FIG. 61 provides a list of primary CpG sites that are breast, endometrial, ovarian, cervical, and uterine cancer and tissue-specific markers, that may be used to identify the presence of breast, endometrial, ovarian, cervical, and uterine cancer from cfDNA, DNA within exosomes, or DNA in other protected states (such as within CTCs) within the blood. FIG. 62 provides a list of chromosomal regions or sub-regions within which are primary CpG sites that are breast, endometrial, ovarian, cervical, and uterine cancer and tissue-specific markers, that may be used to identify the presence of breast, endometrial, ovarian, cervical, and uterine cancer from cfDNA, DNA within exosomes, or DNA in other protected states (such as within CTCs) within the blood. These lists contain preferred primary CpG sites and their flanking sites, as well as alternative markers that may be used to distinguish breast, endometrial, ovarian, cervical, and uterine cancers. Primer sets for exemplary preferred and alternate methylation markers are listed in Table 54 in the experimental section. A selection of 64 of these markers with average sensitivities of 50% gave the following scores for Group 2: (breast=36, endometrial=49, ovarian=32, cervical=33, uterine=47), which would translate into the following number of marker equivalents with average sensitivities of 50% (=64×score/50); (breast=47 marker equivalents; endometrial=63 marker equivalents; ovarian=41 marker equivalents; cervical=42 marker equivalents; uterine=61 marker equivalents). Thus, all were well above the average 36-marker equivalents minimum. The marker equivalents with average sensitivities of 66% gave the following scores (=64×score/66); (breast=35 marker equivalents; endometrial=48 marker equivalents; ovarian=31 marker equivalents; cervical=32 marker equivalents; uterine=46 marker equivalents). Thus three markers are below and two markers are above the average 36-marker equivalents minimum. However, such scores may be improved by selection of different markers.

[0368] Group 3 (lung adenocarcinoma, lung squamous cell carcinoma, and head & neck): Blood-based, lung, head, and neck cancer-specific microRNA markers that may be used to distinguish group 3 from other groups include, but are not limited to: (mir ID, Gene ID): hsa-mir-28, MIR28. This marker was identified through analysis of TCGA microRNA datasets, and may be present in exosomes, tumor-associated vesicles, Argonaute complexes, or other protected states in the blood.

[0369] Blood-based lung, head, and neck cancer-specific exon transcripts that may be used to distinguish group 3 from other groups include, but are not limited to: (Exon location, Gene); chr2: chr1:93307721-93309752:−, FAM69A; chr1:93312740-93312916:−, FAM69A; chr1:93316405-93316512:−, FAM69A; chr1:93341853-93342152:−, FAM69A; chr1:93426933-93427079:−, FAM69A; chr7:40221554-40221627:+, C7orf10; chr7:40234539-40234659:+, C7orf10; chr8:22265823-22266009:+, SLC39A14; chr8:22272293-22272415:+, SLC39A14; chr14:39509936-39510091:−, SEC23A; chr14:39511990-39512076:−, SEC23A, and may be enriched in exosomes, tumor-associated vesicles, or other protected states in the blood.

[0370] Lung, head, and neck cancer protein encoding markers that may be used to distinguish group 3 from other groups include, but are not limited to: (Gene Symbol, Chromosome Band, Gene Title, UniProt ID): STRN3, 14q13-q21, striatin, calmodulin binding protein 3, Q13033; LRRC17, 7q22.1, leucine rich repeat containing 17, Q8N6Y2; FAM69A, 1p22, family with sequence similarity 69, member A, Q5T7M9; ATF2, 2q32, activating transcription factor 2, P15336; BHMT, 5q14.1, betaine-homocysteine S-methyltransferase, Q93088; ODZ3/TENM3, 4q34.3-q35.1, teneurin transmembrane protein 3, Q9P273; ZFHX4, 8q21.11, zinc finger homeobox 4, Q86UP3. These markers may be identified through mRNA sequences, protein expression levels, protein product concentrations, cytokines, or autoantibody to the protein product arising from lung, head, and neck cancers, which may be identified in the blood, either within exosomes, other protected states, tumor-associated vesicles, or free within the plasma.

[0371] Protein markers that can be secreted by lung, head, and neck cancer into the blood may be used to distinguish group 3 from other groups include, but are not limited to: (Protein name, UniProt ID); Leucine-rich repeat-containing protein 17 (p37NB), Q8N6Y2. A comparative analysis was performed across various TCGA datasets (tumors, normals), followed by an additional bioinformatics filter (Meinken et al., “Computational Prediction of Protein Subcellular Locations in Eukaryotes: an Experience Report,” Computational Molecular Biology 2(1):1-7 (2012), which is hereby incorporated by reference in its entirety), which predicts the likelihood that the translated protein is secreted by the cells.

[0372] The distribution of mutations in lung, head, and neck cancer are available in the public COSMIC database, with the common being: CSMD3 (CUB and Sushi multiple domains 3), DNAH5 (dynein axonemal heavy chain 5), FAT1 (FAT atypical cadherin 1), FLG (filaggrin), KRAS (Ki-ras2 Kirsten rat sarcoma viral oncogene homolog), LRP1B (LDL receptor related protein 1B), MUC16 (mucin 16, cell surface associated), PCLO (piccolo presynaptic cytomatrix protein), PM-DILI (PKHD1 like 1), RELN (reelin), RYR2 (ryanodine receptor 2), SI (sucrase-isomaltase), SYNE1 (spectrin repeat containing nuclear envelope protein 1), TP53 (tumor protein p53), TTN (titin), USH2A (usherin), and XIRP2 (xin actin binding repeat containing 2).

[0373] FIG. 63 provides a list of primary CpG sites that are lung, head, and neck cancer and tissue-specific markers, that may be used to identify the presence of lung, head, and neck cancer from cfDNA, DNA within exosomes, or DNA in other protected states (such as within CTCs) within the blood. FIG. 64 provides a list of chromosomal regions or sub-regions within which are primary CpG sites that are lung, head, and neck cancer and tissue-specific markers, that may be used to identify the presence of lung, head, and neck from cfDNA, DNA within exosomes, or DNA in other protected states (such as within CTCs) within the blood. These lists contain preferred primary CpG sites and their flanking sites that may be used to distinguish lung, head, and neck cancers. Primer sets for exemplary methylation markers are listed in Table 55 in the experimental section. A selection of 64 of these markers with average sensitivities of 50% gave the following scores for Group 3: (lung adenocarcinoma=41, lung squamous cell carcinoma=49, head & neck=53), which would translate into the following number of marker equivalents with average sensitivities of 50% (=64×score/50); (lung adenocarcinoma=52 marker equivalents; lung squamous cell carcinoma=62 marker equivalents; head & neck=67 marker equivalents). Thus, all were well above the average 36-marker equivalents minimum. The marker equivalents with average sensitivities of 66% gave the following scores (=64×score/66); (lung adenocarcinoma=40 marker equivalents; lung squamous cell carcinoma=47 marker equivalents; head & neck=51 marker equivalents). Thus all were well above the average 36-marker equivalents minimum.

[0374] Group 4 (prostate and bladder): Blood or urine-based, prostate and bladder cancer-specific microRNA markers may be used to distinguish group 4 from other groups include, but are not limited to: (mir ID, Gene ID): hsa-mir-491, MIR491; hsa-mir-1468, MIR1468. These markers were identified through analysis of TCGA microRNA datasets, and may be present in exosomes, tumor-associated vesicles, Argonaute complexes, or other protected states in the blood or urine.

[0375] Blood or urine-based, prostate and bladder cancer-specific ncRNA and lncRNA markers that may be used to distinguish group 4 from other groups include, but are not limited to: [Gene ID, Coordinate (GRCh38), ENSEMBL ID]: AC007383.3, chr2:206084605-206086564, ENSG00000227946.1; LINC00324, chr17:8220642-8224043, ENSG00000178977.3. These markers were identified through comparative analysis of various publicly available Affymetrix Exon ST CEL data, which were aligned to GENCODE annotations to generate ncRNA and lncRNA transcriptome datasets. Such lncRNA and ncRNA may be enriched in exosomes or other protected states in the blood or urine.

[0376] Blood or urine-based prostate and bladder cancer-specific exon transcripts that may be used to distinguish group 4 from other groups include, but are not limited to: (Exon location, Gene); chr21:45555942-45556055:+, C21orf33 and may be enriched in exosomes, tumor-associated vesicles, or other protected states in the blood or urine.

[0377] Prostate and bladder cancer protein markers that may be used to distinguish group 4 from other groups include, but are not limited to: (Gene Symbol, Chromosome Band, Gene Title, UniProt ID): PMM1, 22q13, phosphomannomutase 1, Q92871. This marker may be identified through mRNA sequences, protein expression levels, protein product concentrations, cytokines, or autoantibody to the protein product arising from lung, head, and neck cancers, which may be identified in the blood, either within exosomes, other protected states, tumor-associated vesicles, or free within the plasma, or within the urine.

[0378] The distribution of mutations in prostate and bladder cancer are available in the public COSMIC database, with the most common being BAGE2 (BAGE family member 2), DNM1P47 (dynamin 1 pseudogene 47), FRG1BP (region gene 1 family member B, pseudogene), KRAS (Ki-ras2 Kirsten rat sarcoma viral oncogene homolog), RP11-156P1.3, TTN (titin), and TUBB8P7 (tubulin beta 8 class VIII pseudogene 7).

[0379] FIG. 65 provides a list of primary CpG sites that are prostate and bladder cancer-specific markers, that may be used to identify the presence of prostate and bladder cancer from cfDNA, DNA within exosomes, or DNA in other protected states (such as within CTCs) within the blood or urine. FIG. 66 provides a list of chromosomal regions or sub-regions within which are primary CpG sites that are prostate and bladder cancer specific markers, that may be used to identify the presence of prostate and bladder from cfDNA, or DNA within exosomes, or DNA in other protected states (such as within CTCs) within the blood or urine. These lists contain preferred primary CpG sites and their flanking sites that may be used to distinguish prostate and bladder cancers. Primer sets for exemplary methylation markers are listed in Table 56 in the experimental section. A selection of 48 of these markers with average sensitivities of 50% gave the following scores for Group 4: (prostate=48, bladder=22), which would translate into the following number of marker equivalents with average sensitivities of 50% (=48×score/50); (prostate=46 marker equivalents; bladder=21 marker equivalents). Thus, bladder was below the average 36-marker equivalents minimum. Likewise, the marker equivalents with average sensitivities of 66% gave the following scores (=48×score/60); (prostate=35 marker equivalents; bladder=16 marker equivalents). Thus, bladder was well below the average 36-marker equivalents minimum. However, a different selection of markers, for example by increasing from 48 to 64 markers and including markers that were positive for both prostate and bladder, would rectify this situation. The markers were limited to those that were not methylated in normal prostate, bladder, or kidney tissue to minimize false-positive results from urine samples.

[0380] Group 5 (liver, pancreatic and gall-bladder): Blood-based, liver, pancreatic and gall-bladder cancer-specific microRNA markers that may be used to distinguish group 5 from other groups include, but are not limited to: (mir ID, Gene ID): hsa-mir-132, MIR132. This marker was identified through analysis of TCGA microRNA datasets, which may be present in exosomes, tumor-associated vesicles, Argonaute complexes, or other protected states in the blood.

[0381] FIG. 67 provides a list of blood-based, liver, pancreatic and gall-bladder cancer-specific ncRNA and lncRNA markers derived through comparative analysis of various publicly available Affymetrix Exon ST CEL data, which were aligned to GENCODE annotations to generate ncRNA and lncRNA transcriptome datasets. Such lncRNA and ncRNA may be enriched in exosomes or other protected states in the blood.

[0382] In addition, FIG. 68 provides a list of blood-based liver, pancreatic and gall-bladder cancer-specific exon transcripts that may be enriched in exosomes, tumor-associated vesicles, or other protected states in the blood.

[0383] FIG. 69 provides a list of liver, pancreatic and gall-bladder cancer protein markers, identified through mRNA sequences, protein expression levels, protein product concentrations, cytokines, or autoantibody to the protein product arising from liver, pancreatic and gall-bladder cancers, which may be identified in the blood, either within exosomes, other protected states, tumor-associated vesicles, or free within the plasma.

[0384] Protein markers that can be secreted by liver, pancreatic and gall-bladder cancer into the blood that may be used to distinguish group 5 from other groups include, but are not limited to: (Protein name, UniProt ID); Gelsolin (AGEL) (Actin-depolymerizing factor) (ADF) (Brevin), P06396; Pro-neuregulin-2, O14511; CD59 glycoprotein (1F5 antigen) (20 kDa homologous restriction factor) (HRF-20) (HRF20) (MAC-inhibitory protein) (MAC-IP) (MEM43 antigen) (Membrane attack complex inhibition factor) (MACIF) (Membrane inhibitor of reactive lysis) (MIRL) (Protectin) (CD antigen CD59), P13987; Divergent protein kinase domain 2B (Deleted in autism-related protein 1), Q9H7Y0. A comparative analysis was performed across various TCGA datasets (tumors, normals), followed by an additional bioinformatics filter (Meinken et al., “Computational Prediction of Protein Subcellular Locations in Eukaryotes: an Experience Report,” Computational Molecular Biology 2(1):1-7 (2012), which is hereby incorporated by reference in its entirety), which predicts the likelihood that the translated protein is secreted by the cells.

[0385] The distribution of mutations in liver, pancreatic and gall-bladder cancer are available in the public COSMIC database, with the most common being: KRAS (Ki-ras2 Kirsten rat sarcoma viral oncogene homolog), MUC16 (mucin 16, cell surface associated), MUC4 (mucin 4, cell surface associated), TP53 (tumor protein p53), and TTN (titin).

[0386] FIG. 70 provides a list of primary CpG sites that are liver, pancreatic and gall-bladder cancer and tissue-specific markers, that may be used to identify the presence of lung, head, and neck cancer from cfDNA, DNA within exosomes, or DNA in other protected states (such as within CTCs) within the blood. FIG. 71 provides a list of chromosomal regions or sub-regions within which are primary CpG sites that are liver, pancreatic and gall-bladder cancer and tissue-specific markers, that may be used to identify the presence of liver, pancreatic and gall-bladder from cfDNA, DNA within exosomes, or DNA in other protected states (such as within CTCs) within the blood. These lists contain preferred primary CpG sites and their flanking sites, as well as alternative markers that may be used to distinguish liver, pancreatic and gall-bladder cancers. Primer sets for exemplary preferred and alternate methylation markers are listed in Table 57 in the experimental section. A selection of 64 of these markers with average sensitivities of 50% gave the following scores for Group 5: (liver=57, pancreatic=30, gall bladder=60), which would translate into the following number of marker equivalents with average sensitivities of 50% (=64×score/50); (liver=73 marker equivalents; pancreatic=38 marker equivalents; gall bladder=77 marker equivalents). Thus, all were above the average 36-marker equivalents minimum. The marker equivalents with average sensitivities of 66% gave the following scores (=64×score/66); (liver=56 marker equivalents; pancreatic=29 marker equivalents; gall bladder=58 marker equivalents). Thus, liver and gall bladder were above the average 36-marker equivalents minimum, while pancreatic was below.

[0387] Consider the first strategy using the 96 pan-oncology markers of detecting early colorectal cancer (FIG. 1C). The calculations are done with the anticipation of an average of 150 methylated molecules per positive marker in the blood. As described supra, for the example of colorectal cancer, in particular the cases of microsatellite stable tumors (MSS) where the mutation load is low, for these calculations when relying on NGS sequencing alone (assuming 150 molecules with one mutation in the blood), an estimated 78% of early colorectal cancer would be missed. Again, to put these number in perspective, in the U.S., about 135,000 new cases of colorectal cancer were diagnosed in 2018, of which about 60% is late cancer (i.e. Stage III & IV). About 107 million individuals in the U.S. are over the age of 50 and should be tested for colorectal cancer. While it cannot be predicted how many individuals have a hidden cancer (i.e. Stage I) within them, who are non-compliant to testing, for the purposes of this calculation, assume that the average late cancer was once the average early cancer, and thus individuals with Stage I cancer would be about 40,500 individuals. Assuming individual marker false-positive rates of 3%, and with the first step using 96 markers (48 markers for CRC) with average sensitivities of 50%, requiring a minimum of 5 markers positive, then with an overall specificity of 95.8%, the first step would identify 4,494,000 individuals (out of 107,000,000 total adults over 50 in the U.S.) which would include at 71.6% sensitivity or about 28,998 individuals with Stage I colorectal cancer (out of 40,500 individuals with Stage I cancer). However, those 4,494,000 presumptive positive individuals would be evaluated in a second step of 64 markers (48 markers for CRC) with average sensitivities of 50%, requiring a minimum of 5 markers positive, then the two-step test would identify 71.6%×71.6%=51.2%=20,762 individuals (out of 40,500 individuals with Stage I cancer) with colorectal cancer. With a specificity of 95.8%, the second test would also generate 4,494,000×4.2%=188,748 false-positives. The positive predictive value of such a test would be 20,762/(188,748+20,762)=9.9%, in other words, 1 in 10 individuals who tested positive would actually have Stage I colorectal cancer. In reality, one would need to also include the success for identifying Stage 2 and higher cancers. In expanding this example, the calculations are done with the anticipation that Stage I CRC has an average of 150 methylated molecules per positive marker in the blood, Stage II CRC has an average of 200 methylated molecules per positive marker, and the higher stages (III & IV) have at least an average of 300 methylated molecules per positive marker, and the higher stages. Also, to be consistent with the idea that as the test is used repeatedly, more of early and less of late CRC will be detected, than an estimate of 40,500 individuals with Stage I cancer, 40,500 individuals with Stage II cancer, and the remaining 54,000 individuals have late-stage cancer=135,000 total individuals with colorectal cancer identified per year in the U.S. The above calculation already provided the false-positive rate for the early cancer. For Stage II cancer, 90.1% would be identified in the first step, of which 90.1%×90.1%=81.0%=32,877 individuals with Stage II cancer would be verified in the second step. For Stage III and IV cancer, 99.3% would be identified in the first step, of which 99.3%×99.3%=98.6%=53,246 individuals with late cancer would be identified. This brings the total identified at 20,762+32,877+53,246=106,885 individuals out of 135,000 with colorectal cancer, for an overall sensitivity of 79%. Overall, the positive predictive value of such a test would be 106,885/(188,748+106,885)=36.1%, in other words, 1 in 3 individuals who tested positive would actually have colorectal cancer, and this test would identify 53,639/81,000 or 66% of those individuals with early cancer, compared with the current rate of 40%.

[0388] How would these results vary for using this strategy (FIG. 1C) for detection of early colorectal cancer using 50% average marker sensitivities, with the anticipation of Stage I CRC having an average of 200 methylated molecules per positive marker in the blood, Stage II CRC having an average of 240 methylated molecules per positive marker, and the higher stages (III & IV) having at least an average of 300 methylated molecules per positive marker?

[0389] Assuming individual marker false-positive rates of 3%, the first step using 96 markers (48 markers for CRC) with average sensitivities of 50%, requiring a minimum of 5 markers positive, and an overall specificity of 95.8%, the first step would identify 4,494,000 individuals (out of 107,000,000 total adults over 50 in the U.S.). This would include, at 90.1% sensitivity, or about 36,490 individuals with Stage I colorectal cancer (out of 40,500 individuals with Stage I cancer). However, those 4,494,000 presumptive positive individuals would be evaluated in a second step of 64 markers (48 markers for CRC) with average sensitivities of 50%, requiring a minimum of 5 markers positive. The two-step test would identify 90.1%×90.1%=81.2%=32,877 individuals (out of 40,500 individuals with Stage I cancer) with colorectal cancer. With a specificity of 95.8%, the second test would also generate 4,494,000×4.2%=188,748 false-positives. The positive predictive value of such a test would be 32,877/(188,748+32,877)=14.8%. In other words, 1 in 6.7 individuals who tested positive would actually have Stage I colorectal cancer. In reality, one would need to also include the success for identifying Stage 2 and higher cancers. To be consistent with the idea that, as the test is used repeatedly, more of early and less of late CRC will be detected, an estimated 40,500 individuals with Stage I cancer, 40,500 individuals with Stage II cancer, and 54,000 individuals with late-stage cancer (135,000 total individuals with colorectal cancer) would be identified per year in the U.S. The above calculation already provided the false-positive rate for the early cancer. For Stage II cancer, 90.1% would be identified in the first step, of which 97.2%×97.2%=94.5%=38,263 individuals with Stage II cancer would be verified in the second step. For Stage III and IV cancer, 99.3% would be identified in the first step, of which 99.3%×99.3%=98.6%=53,246 individuals with late cancer would be identified. This brings the total identified to 32,877+38,263+53,246=124,386 individuals out of 135,000 with colorectal cancer, for an overall sensitivity of 92.1%. Overall, the positive predictive value of such a test would be 124,386/(188,748+124,386)=39.7%. In other words, 1 in 2.5 individuals who tested positive would actually have colorectal cancer, and this test would identify 71,104/81,000 or 87.7% of those individuals with early cancer, compared with the current rate of 40%.

[0390] How would these results vary when using this strategy (FIG. 1C) for detection of early ovarian cancer, with the anticipation of an average of 150 methylated molecules per positive marker in the blood? When relying on NGS sequencing alone (assuming 150 molecules with one mutation in the blood), an estimated 78% of early ovarian cancer would be missed. Again, to put these number in perspective, in the U.S., about 22,000 new cases of ovarian cancer were diagnosed in 2018, of which about 85% was late cancer (i.e. Stage III & IV). About 54 million women in the U.S. are between the ages of 50 and 79 and should be tested for ovarian cancer. While it cannot be predicted how many individuals have a hidden cancer (i.e. Stage I), for the purposes of this calculation, assume that the stages are evenly divided. Thus, the number of individuals with Stage I ovarian cancer would be about 5,500 individuals. Assuming individual marker false-positive rates of 3%, the first step using 96 markers (36 markers for ovarian) with average sensitivities of 50%, requiring a minimum of 5 markers positive, and an overall specificity of 99.1%, the first step would identify 486,000 individuals (out of 54,000,000 total women ages 50-79 in the U.S.) with ovarian cancer. This would include, at 46.8% sensitivity, or about 2,574 individuals with Stage I ovarian cancer (out of 5,500 individuals with Stage I ovarian cancer). However, those 486,000 presumptive positive individuals would be evaluated in a second step of 64 markers (36 markers for ovarian cancer) with average sensitivities of 50%, requiring a minimum of 5 markers positive. The two-step test would identify 46.8%×46.8%=21.9%=1,204 individuals (out of 5,500 individuals with Stage I ovarian cancer) with ovarian cancer. With a specificity of 99.1%, the second test would also generate 486,000×0.9%=4,374 false-positives. The positive predictive value of such a test would be 1,204/(4,374+1,204)=21.6%. In other words, 1 in 4.6 individuals who tested positive would actually have Stage I ovarian cancer. In reality, one would need to also include the success for identifying Stage 2 and higher ovarian cancers. In expanding this example, the calculations are done with the anticipation that Stage I ovarian cancer has an average of 150 methylated molecules per positive marker in the blood, Stage II ovarian cancer has an average of 200 methylated molecules per positive marker, and the higher stages (III & IV) have at least an average of 300 methylated molecules per positive marker. To be consistent with the idea that, as the test is used repeatedly, more cancer will be detected and all four stages are at 5,500, then 5,500×4=22,000 total individuals with ovarian cancer would be identified per year in the U.S. The above calculation already provided the false-positive rate for the early cancer. For Stage II cancer, 71.5% would be identified in the first step, of which 71.5%×71.5%=51.1%=2,810 individuals with Stage II ovarian cancer would be verified in the second step. For Stage III and IV ovarian cancer, 94.5% would be identified in the first step, of which 94.5%×94.5%=89.3%=9,823 individuals with late ovarian cancer would be identified. This brings the total identified at 1,204+2,810+9,823=13,837 individuals out of 22,000 with ovarian cancer, for an overall sensitivity of 62.9%. Overall, the positive predictive value of such a test would be 13,837/(13,837+4,374)=76.0%. In other words, 3 in 4 women who tested positive would actually have ovarian cancer, and this test would identify 4,014/11,000, or 36.5%, of those individuals with early cancer, compared with the current rate of 15%.

[0391] How would these results vary for using this strategy (FIG. 1C) for detection of early ovarian cancer using 50% average marker sensitivities, with the anticipation that Stage I ovarian cancer has an average of 200 methylated molecules per positive marker in the blood, Stage II ovarian cancer has an average of 240 methylated molecules per positive marker, and the higher stages (III & IV) have at least an average of 300 methylated molecules per positive marker?

[0392] Assuming individual marker false-positive rates of 3%, the first step using 96 markers (36 markers for ovarian) with average sensitivities of 50%, and requiring a minimum of 5 markers positive, with an overall specificity of 99.1%, the first step would identify 486,000 individuals (out of 54,000,000 total women ages 50-79 in the U.S.) with ovarian cancer. This would include at, 71.5% sensitivity, about 3,932 individuals with Stage I ovarian cancer (out of 5,500 individuals with Stage I ovarian cancer). However, those 486,000 presumptive positive individuals would be evaluated in a second step of 64 markers (36 markers for ovarian cancer) with average sensitivities of 50%, requiring a minimum of 5 markers positive. The two-step test would identify 71.5%×71.5%=51.1%=2,810 individuals (out of 5,500 individuals with Stage I ovarian cancer) with ovarian cancer. With a specificity of 99.1%, the second test would also generate 486,000×0.9%=4,374 false-positives. The positive predictive value of such a test would be 2,810/(4,374+2,810)=39.1%. In other words, 1 in 2.5 individuals who tested positive would actually have Stage I ovarian cancer. In reality, one would need to also include the success for identifying Stage 2 and higher ovarian cancers. As the test is used repeatedly, assume all four stages are at 5,500, and, therefore, 5,500×4=22,000 total individuals with ovarian cancer would be identified per year in the U.S. The above calculation already provided the false-positive rate for the early cancer. For Stage II cancer, 84.4% would be identified in the first step, of which 84.4%×84.4%=71.2%=3,916 individuals with Stage II ovarian cancer would be verified in the second step. For Stage III and IV ovarian cancer, 94.5% would be identified in the first step, of which 94.5%×94.5%=89.3%=9,823 individuals with late ovarian cancer would be identified. This brings the total identified to 2,810+3,916+9,823=16,549 individuals out of 22,000 with ovarian cancer, for an overall sensitivity of 75.2%. Overall, the positive predictive value of such a test would be 16,549/(16,549+4,374)=79.0%. In other words, 4 in 5 women who tested positive would actually have ovarian cancer. This test would identify 6,006/11,000 or 54.6% of those individuals with early cancer, compared with the current rate of 15%.

[0393] The above calculations worked under the assumption of limiting at least one set of markers to an average of 50% sensitivity. How would the results improve if the average of 50% sensitivity was improved to 66% sensitivity?

[0394] Consider the strategy of using the 96 pan-oncology markers for detecting early colorectal cancer (FIG. 1D). The calculations are done with the anticipation of an average of 150 methylated molecules per positive marker in the blood. As described supra, assume that the average late cancer was once the average early cancer, and thus individuals with Stage I cancer would be about 40,500 individuals. Assuming individual marker false-positive rates of 3%, the first step using 96 markers (48 markers for CRC) with average sensitivities of 66%, requiring a minimum of 5 markers positive, and an overall specificity of 95.8%, the first step would identify 4,494,000 individuals (out of 107,000,000 total adults over 50 in the U.S.) with Stage I colorectal cancer. This would include, at 90.0% sensitivity, about 36,450 individuals with Stage I colorectal cancer (out of 40,500 individuals with Stage I cancer). However, those 4,494,000 presumptive positive individuals would be evaluated in a second step of 64 markers (48 markers for CRC) with average sensitivities of 66%, and requiring a minimum of 5 markers positive. The two-step test would identify 90.0%×90.0%=89.0%=32,805 individuals (out of 40,500 individuals with Stage I cancer) with colorectal cancer. With a specificity of 95.8%, the second test would also generate 4,494,000×4.2%=188,748 false-positives. The positive predictive value of such a test would be 32,805/(188,748+32,805)=14.8%. In other words, 1 in 7 individuals who tested positive would actually have Stage I colorectal cancer. In reality, one would need to also include the success for identifying Stage 2 and higher cancers. In expanding this example, the calculations are done with the anticipation that Stage I CRC has an average of 150 methylated molecules per positive marker in the blood, Stage II CRC has an average of 200 methylated molecules per positive marker, and the higher stages (III & IV) have at least an average of 300 methylated molecules per positive marker. Also, to be consistent with the idea that as the test is used repeatedly, more of early and less of late CRC will be detected, an estimate of 40,500 individuals would be identified with Stage I cancer, 40,500 individuals would be identified with Stage II cancer, and the remaining 54,000 individuals would be identified with late-stage cancer. This equals 135,000 total individuals with colorectal cancer identified per year in the U.S. The above calculation already provided the false-positive rate for the early cancer. For Stage II cancer, 98.0% would be identified in the first step, of which 98.0%×98.0%=96.0%=38,896 individuals with Stage II cancer would be verified in the second step. For Stage III and IV cancer, 99.6% would be identified in the first step, of which 99.6%×99.6%=99.2%=53,568 individuals with late cancer would be identified. This brings the total identified to 32,805+38,896+53,568=125,269 individuals out of 135,000 with colorectal cancer, for an overall sensitivity of 92.7%. Overall, the positive predictive value of such a test would be 125,269/(188,748+125,269)=39.9%. In other words, 1 in 2.5 individuals who tested positive would actually have colorectal cancer. This test would identify 71,701/81,000, or 88%, of those individuals with early cancer, compared with the current rate of 40%.

[0395] How would these results vary for using this strategy (FIG. 1D) for detection of early colorectal cancer using 66% average marker sensitivities, with the anticipation of Stage I CRC having an average of 200 methylated molecules per positive marker in the blood, Stage II CRC having an average of 240 methylated molecules per positive marker in the blood, and the higher stages (III & IV) having at least an average of 300 methylated molecules per positive marker in the blood?

[0396] Assuming individual marker false-positive rates of 3%, the first step using 96 markers (48 markers for CRC) with average sensitivities of 66%, and requiring a minimum of 5 markers positive, then, with an overall specificity of 95.8%, the first step would identify 4,494,000 individuals with colorectal cancer (out of 107,000,000 total adults over 50 in the U.S.). This would include, at 98.0% sensitivity, about 39,690 individuals with Stage I colorectal cancer (out of 40,500 individuals with Stage I cancer). However, those 4,494,000 presumptive positive individuals would be evaluated in a second step of 64 markers (48 markers for CRC) with average sensitivities of 66%, requiring a minimum of 5 markers positive. The two-step test would identify 98.0%×98.0%=96.0%=38,896 individuals (out of 40,500 individuals with Stage I cancer) with colorectal cancer. With a specificity of 95.8%, the second test would also generate 4,494,000×4.2%=188,748 false-positives. The positive predictive value of such a test would be 38,896/(188,748+38,896)=17.81%. In other words, 1 in 6 individuals who tested positive would actually have Stage I colorectal cancer. In reality, one would need to also include the success for identifying Stage 2 and higher cancers. To be consistent with the idea that, as the test is used repeatedly, more of early and less of late CRC will be detected, an estimate of 40,500 individuals with Stage I cancer would be identified, 40,500 individuals with Stage II cancer would be identified, and the remaining 54,000 individuals would be identified as having late-stage cancer (i.e., 135,000 total individuals with colorectal cancer identified per year in the U.S.). The above calculation already provided the false-positive rate for the early cancer. For Stage II cancer, 98.0% would be identified in the first step, of which 99.6%×99.6%=99.2%=40,176 individuals with Stage II cancer would be verified in the second step. For Stage III and IV cancer, 99.9% would be identified in the first step, of which 99.9%×99.9%=99.8%=53,568 individuals with late cancer would be identified. This brings the total identified to 38,896+40,176+53,892=132,964 individuals out of 135,000 with colorectal cancer, for an overall sensitivity of 98.5%. Overall, the positive predictive value of such a test would be 132,964/(188,748+132,964)=41.3%. In other words, 1 in 2.5 individuals who tested positive would actually have colorectal cancer, and this test would identify 79,072/81,000 or 97.6% of those individuals with early cancer, compared with the current rate of 40%.

[0397] How would these results vary for using the first strategy (FIG. 1D) for detection of early ovarian cancer, with the anticipation of an average of 150 methylated molecules per positive marker in the blood? Again, assume that the stages are evenly divided, and thus, individuals with Stage I ovarian cancer would be about 5,500 individuals. Assuming individual marker false-positive rates of 3%, the first step using 96 markers (36 markers for ovarian) with average sensitivities of 66%, and requiring a minimum of 5 markers positive, then, with an overall specificity of 99.1%, the first step would identify 486,000 individuals (out of 54,000,000 total women ages 50-79 in the U.S.). This would include, at 71.5% sensitivity, about 3,932 individuals with Stage I ovarian cancer (out of 5,500 individuals with Stage I ovarian cancer). However, those 486,000 presumptive positive individuals would be evaluated in a second step of 64 markers (36 markers for ovarian cancer) with average sensitivities of 66%, and requiring a minimum of 5 markers positive. The two-step test would identify 71.5%×71.5%=51.1%=2,810 individuals (out of 5,500 individuals with Stage I ovarian cancer) with ovarian cancer. With a specificity of 99.1%, the second test would also generate 486,000×0.9%=4,374 false-positives. The positive predictive value of such a test would be 2,810/(4,374+2,810)=39.1%. In other words, 1 in 2.5 individuals who tested positive would actually have Stage I ovarian cancer. In reality, one would need to also include the success for identifying Stage 2 and higher ovarian cancers. In expanding this example, the calculations are done with the anticipation that Stage I ovarian cancer has an average of 150 methylated molecules per positive marker in the blood, Stage II ovarian cancer has an average of 200 methylated molecules per positive marker, and the higher stages (III & IV) have at least an average of 300 methylated molecules per positive marker. Also, assuming all four stages are at 5,500, then 5,500×4=22,000 total individuals with ovarian cancer would be identified per year in the U.S. The above calculation already provided the false-positive rate for the early cancer. For Stage II cancer, 90.0% would be identified in the first step, of which 90.0%×90.0%=81.0%=4,485 individuals with Stage II ovarian cancer would be verified in the second step. For Stage III and IV ovarian cancer, 99.2% would be identified in the first step, of which 99.2%×99.2%=98.4%=10,824 individuals with late ovarian cancer would be identified. This brings the total identified at 2,810+4,485+10,824=18,119 individuals out of 22,000 with ovarian cancer, for an overall sensitivity of 82.4%. Overall, the positive predictive value of such a test would be 18,119/(18,119+4,374)=80.5%. In other words, 4 in 5 women who tested positive would actually have ovarian cancer, and this test would identify 7,295/11,000 or 66.3% of those individuals with early cancer, compared with the current rate of 15%.

[0398] How would these results vary for using this strategy (FIG. 1D) for detection of early ovarian cancer using 66% average marker sensitivities, with the anticipation that Stage I ovarian cancer has an average of 200 methylated molecules per positive marker in the blood, Stage II ovarian cancer has an average of 240 methylated molecules per positive marker, and the higher stages (III & IV) have at least an average of 300 methylated molecules per positive marker?

[0399] Assuming individual marker false-positive rates of 3%, the first step using 96 markers (36 markers for ovarian) with average sensitivities of 66%, and requiring a minimum of 5 markers positive, then, with an overall specificity of 99.1%, the first step would identify 486,000 individuals (out of 54,000,000 total women ages 50-79 in the U.S). This would include, at 90.0% sensitivity, about 4,950 individuals with Stage I ovarian cancer (out of 5,500 individuals with Stage I ovarian cancer). However, those 486,000 presumptive positive individuals would be evaluated in a second step of 64 markers (36 markers for ovarian cancer) with average sensitivities of 66%, requiring a minimum of 5 markers positive. The two-step test would identify 90.0%×90.0%=81.0%=4,895 individuals (out of 5,500 individuals with Stage I ovarian cancer) with ovarian cancer. With a specificity of 99.1%, the second test would also generate 486,000×0.9%=4,374 false-positives. The positive predictive value of such a test would be 4,895/(4,374+4,895)=52.8%. In other words, 1 in 2 individuals who tested positive would actually have Stage I ovarian cancer. In reality, one would need to also include the success for identifying Stage 2 and higher ovarian cancers. Assuming all four stages are at 5,500, then 5,500×4=22,000 total individuals with ovarian cancer would be identified per year in the U.S. The above calculation already provided the false-positive rate for the early cancer. For Stage II cancer, 96.2% would be identified in the first step, of which 96.2%×96.2%=92.5%=5,087 individuals with Stage II ovarian cancer would be verified in the second step. For Stage III and IV ovarian cancer, 99.2% would be identified in the first step, of which 99.2%×99.2%=98.4%=10,824 individuals with late ovarian cancer would be identified. This brings the total identified at 4,895+5087+10,824=20,806 individuals out of 22,000 with ovarian cancer, for an overall sensitivity of 94.6%. Overall, the positive predictive value of such a test would be 20,806/(20,806+4,374)=87.4%. In other words, 7 in 8 women who tested positive would actually have ovarian cancer, and this test would identify 9,982/11,000 or 90.1% of those individuals with early cancer, compared with the current rate of 15%.

[0400] The biology of each cancer is different, and thus the observed sensitivity and specificity for detecting early cancer, monitoring treatment, and detecting early recurrence may be higher or lower from the idealized calculations described herein.

### EXAMPLES

### Examples: Multiplex PCR-LDR-qPCR Detection of Cancer-Related Methylation Markers

### General Methods for Examples 1-5

[0401] HT-29 colon adenocarcinoma cells were seeded in 60 cm² culture dishes in McCoy's 5A medium containing 4.5 g/l glucose, supplemented with 10% fetal calf serum, and kept in a humidified atmosphere containing 5% CO₂. Once cells reached 80-90% confluence, they were washed in Phosphate Buffered Saline (×3), and collected by centrifugation (500×g). Genomic DNA was isolated using the DNeasy Blood & Tissue Kit (Qiagen; Valencia, Calif.), and its concentration measured using Quant-iT Pico green Assay (Life Technologies/Thermo-Fisher; Waltham, Mass.).

[0402] High molecular weight (>50 kb) genomic DNA (0.2 mg/ml) isolated from human blood (buffy coat) (Roche human genomic DNA) was purchased from Roche (Indianapolis, Ind.) Its concentration was similarly determined using Quant-iT PicoGreen dsDNA Assay Kit.

[0403] Cell free DNA was isolated from 5 ml plasma sample (with K₂EDTA additive as anti-coagulant) using the QIA amp Circulating Nucleic Acid Kit according to manufacturer's instructions, and quantified using Quant-iT Pico Green Assay (Life Technologies/ThermoFisher; Waltham, Mass.).

[0404] 0.5-1.0 μg HT29 cell line genomic DNA was digested with 10 units of the restriction enzyme Bsh1236I in 20 μl of reaction solution containing 1×CutSmart buffer (50 mM Potassium Acetate, 20 mM Tris-Acetate, 10 mM Magnesium Acetate, 100 μg/ml BSA, pH 7.9 at 25° C.). The digestion reaction was carried out at 37° C. for 1 hour, followed by enzyme inactivation at 80° C. for 20 min. Alternatively, genomic DNAs can be fragmented through non random sonication method, using Covaris ultra sonicator (Woburn, Mass.). After shearing, the quality of the resulting DNA fragments (length ranged from 50 to 1 kb base pairs) was assessed with Agilent Bioanalyzer system. This is followed by an enrichment step wherein the DNA fragments containing methylated CpGs are then captured by methylation-specific antibodies, using the EpiMark® Methylated DNA Enrichment Kit according to manufacturer's instructions (New England Biolabs; Ipswich, Mass.).

[0405] PCR Primers, LDR Probes, and LNA or PNA Blocking Primers.

[0406] All primers used for the one or two-step assay to detect colorectal cancer are listed in Table 45 below. All primers were purchased from Integrated DNA Technologies Inc. (IDT) (Coralville, Iowa), except for LNA1 and LNA2, which were purchased from Exiqon Inc. (Woburn, Mass.), and PNA, which was purchased from PNA Bio (Thousand Oaks, Calif.). Primers designed for use in Step 1 of the 96-marker assay, with average sensitivities of 50%, detect solid tumors are listed in Table 46 below. Primers designed for use in Step 2 of the Group 1-64-marker assay, with average sensitivities of 50%, to detect and identify colorectal, stomach, and esophageal cancers are listed in Table 53 below. Primers designed for use in Step 2 of the Group 2-48-64-marker assay, with average sensitivities of 50%, to detect and identify breast, endometrial, ovarian, cervical, and uterine cancers are listed in Table 54 below. Primers designed for use in Step 2 of the Group 3-48-64-marker assay, with average sensitivities of 50%, to detect and identify lung adenocarcinomas, lung squamous cell carcinoma, and head & neck cancers are listed in Table 55 below. Primers designed for use in Step 2 of the Group 4-36-48-marker assay, with average sensitivities of 50%, to detect and identify prostate and bladder cancers are listed in Table 56 below. Primers designed for use in Step 2 of the Group 5-48-64-marker assay, with average sensitivities of 50%, to detect and identify liver, pancreatic, and gall-bladder cancers are listed in Table 57 below.

Lengthy table referenced here
US20220243263A1-20220804-T00001
Please refer to the end of the specification for access instructions.

Lengthy table referenced here
US20220243263A1-20220804-T00002
Please refer to the end of the specification for access instructions.

Lengthy table referenced here
US20220243263A1-20220804-T00003
Please refer to the end of the specification for access instructions.

Lengthy table referenced here
US20220243263A1-20220804-T00004
Please refer to the end of the specification for access instructions.

Lengthy table referenced here
US20220243263A1-20220804-T00005
Please refer to the end of the specification for access instructions.

Lengthy table referenced here
US20220243263A1-20220804-T00006
Please refer to the end of the specification for access instructions.

Lengthy table referenced here
US20220243263A1-20220804-T00007
Please refer to the end of the specification for access instructions.

Lengthy table referenced here
US20220243263A1-20220804-T00008
Please refer to the end of the specification for access instructions.

Lengthy table referenced here
US20220243263A1-20220804-T00009
Please refer to the end of the specification for access instructions.

Lengthy table referenced here
US20220243263A1-20220804-T00010
Please refer to the end of the specification for access instructions.

Lengthy table referenced here
US20220243263A1-20220804-T00011
Please refer to the end of the specification for access instructions.

Lengthy table referenced here
US20220243263A1-20220804-T00012
Please refer to the end of the specification for access instructions.

Lengthy table referenced here
US20220243263A1-20220804-T00013
Please refer to the end of the specification for access instructions.

### Example 1: Detection of VIM Promoter Methylation in HT29 Colorectal Cancer Cell Line Using exPCR-LDR-qPCR at the Single Molecule Level

[0407] 500 ng HT29 cell line genomic DNA was digested with 10 units of restriction enzyme Bsh1236I in 20 μl of reaction solution containing 1×CutSmart buffer (50 mM Potassium Acetate, 20 mM Tris-Acetate, 10 mM Magnesium Acetate, 100 μg/ml BSA, pH 7.9 at 25° C.). The digestion reactions were carried out at 37° C. for 1 hour, followed by enzyme inactivation at 80° C. for 20 min.

[0408] The digests were then bisulfite converted using EZ DNA Methylation-Lightning kit from Zymo Research Corporation (Irvine, Calif.). In this reaction, 130 μl of Lightning Conversion Reagent was added to 20 μl of digested genomic DNA. The reaction was incubated at 98° C. for 8 minutes, 54° C. for one hour, and stopped at 4° C.

[0409] 600 μl of M-Binding Buffer was added to a Zymo-Spin™ Column and the column inserted into a collection tube. The digested DNA (150 μl) from previous step was then loaded into the column. Capped, the column was inverted several times to mix the solution, then centrifuged at full speed (>10,000×g) for 30 sec. After discarding the flow through, 100 μl of M-washing buffer was added to the column, followed by another round of centrifugation at full speed for 30 second. The resulting flow through was then discarded. 200 μl of L-Desulphonation Buffer was then added to the column, and the column allowed to stand at room temperature for 15-20 minutes. After the incubation, the column was centrifuged at full speed for 30 seconds. 200 μl of M-Wash Buffer was then added to the column, followed by centrifugation at full speed for 30 second. The flow through was discarded. This wash step was repeated once. The column was then inserted into a 1.5 ml micro centrifuge tube, and 10 μl of M-Elution buffer was added to the column matrix. Finally, the column was centrifuged at full speed for 30 second to elute the DNA.

[0410] All the necessary primers (listed in Table 42) were purchased from Integrated DNA Technologies Inc. (IDT) (Coralville, Iowa), except for LNA1 and LNA2, which was purchased from Exiqon Inc. (Woburn, Mass.), and PNA, which was purchased from PNA Bio (Thousand Oaks, Calif.).

[0411] A 130 μl-volume PCR reaction was set up as follows: 23.14 μl of nuclease free water (IDT), 26 μl of Gotaq Flexi buffer 5× without Magnesium (Pro-mega, Madison, Wis.), 10.4 μl of MgCl₂ at 25 mM (Pro-mega, Madison, Wis.), 2.6 μl of dNTPs (10 mM each of dATP, dCTP, dGTP and dUTP) (Promega, Madison, Wis.), 3.25 μl of iCDx-2031-VIM-S3-FP forward primer at 2 μM, 3.25 μl of iCDx-2032-VIM-S3-PR reverse primer at 2 μM, 16.25 μl of iCDx-VIM-S3-LNA2 blocking primer at 2 μM, 3.25 μl of RNAseH2 (IDT) at 20 mU/μl, 2.86 μl of Klentaql polymerase (DNA Polymerase Technology, St. Louis, Mo.) mixed with Plantinim Taq Antibody (Invitrogen, Carlsbad, Calif.) (the mixture is prepared by adding 0.3 μl of Klentaql polymerase at 50 U/μl to 3 μl of Platinum Taq Antibody at 5 U/μl), and 39 μl of corresponding template. 39 μl of templates contains: (1) 0.070 ng (20 copy of Genome Equivalent GE) HT-29 DNA mixed with 9 ng (2500 GE) Roche hgDNA. (2) 0.035 ng (10 GE) HT-29 cell line DNA mixed with 9 ng (2500 GE) Roche hgDNA. (3) 9 ng (2500 GE) Roche DNA, (4) nuclease free water for the Non Template Control (NTC).

[0412] Each 130 μl PCR mixture was divided into 12 tubes, 10 μl each, and then the PCR reactions were run in a Proflex PCR system thermo-cycler (Applied Biosystems/ThermoFisher; Waltham, Mass.) with the following program: 2 min at 95° C., 35 cycles of (10 sec at 94° C., 30 sec at 60° C., and 30 sec at 72° C.), 10 min at 99.5° C., and a final hold at 4° C.

[0413] The LDR step was performed in a 10 μl reaction prepared by adding: 5.82 μl of nuclease free water (IDT), 1 μl of 10×AK16D ligase reaction buffer [1× buffer contains 20 mM Tris-HCl at pH 8.5 (Bio-Rad, Hercules, Calif.), 5 mM MgCl₂ (Sigma-Aldrich, St. Louis, Mo.), 50 mM KCl (Sigma-Aldrich), 10 mM DTT (Sigma-Aldrich) and 20 μg/ml of BSA (Sigma-Aldrich), 0.25 μl of DTT (Sigma-Aldrich) at 40 mM, 0.25 μl of NAD⁺ (Sigma-Aldrich) at 40 mM, 0.25 of RNAseH2 (IDT) at 20 mU/μl, 0.2 μl of iCDx-2033-Vim-S3-Up probe at 500 nM, 0.2 μl of iCDx-2034A-Vim-S3-Dn probe at 500 nM, 0.028 μl of purified AK16D ligase at 8.8 μM, and 2 μl of PCR reaction. LDR reactions were run in a Proflex PCR system thermocycler (Applied Biosystems) with the following program: 20 cycles of (10 sec at 94° C., and 4 min at 60° C.) followed by a final infinite hold at 4° C.

[0414] The qPCR step was performed in a 10 μl of reaction mixture prepared by adding: 1.5 μl of nuclease free water (IDT), 5 μl of 2×TaqMan® Fast Universal PCR Master Mix (consists of Amplitaq, UDG and dUTP) from Applied Biosystems (Life Technologies, Grand Island, N.Y.), 1 μl of iCDx-2036-Vim-S3-RT-FP forward primer at 2.5 μM, 1 μl of iCDx-2037-Vim-S3-RT-RP reverse primer at 2.5 μM, 0.5 μl of iCDx-2035-Vim-S3-RT-Pb Taqman™ probe at 5 μM, and 1 μl of LDR reaction products. The qPCR reactions were run in a ViiA7 real-time thermo-cycler from Applied Biosystems (Life Technologies, Grand Island, N.Y.), using MicroAmp® Fast-96-Well Reaction 0.1 ml plates sealed with MicroAmp™ Optical adhesive film (Applied Biosystems), with the following settings: fast block, Standard curve as experiment type, ROX as passive reference, Ct as quantification method (automatic threshold, but adjusted to 0.05 when needed), TAMRA as reporter, and NFQ-MGB as quencher. The program was set at: 2 min at 50° C., and 40 cycles of (1 sec at 95° C., and 20 sec at 60° C.).

[0415] The pixel experiment results are shown in FIG. 72, while the resulting Ct values for different conditions are listed in Table 43. The following primer sequences from Table 58 were used in this Example: SEQ ID NOs.:1-10.

TABLE 58
Results of Pixel Experiments to Detect Methylation in HT-29 DNA in the Background
of Roche Human Genomic DNA. Ct Values in the Different Conditions.

| | GE per | | | | | | | | | | | | | |
|---|---|---|---|---|---|---|---|---|---|---|---|---|---|---|
| | 130 μl | | | | | | | | | | | | | Total No. |
| Templates | of PCR | 1 | 2 | 3 | 4 | 5 | 6 | 7 | 8 | 9 | 10 | 11 | 12 | Amplif. |
| HT29 + | 20 GE + | 21.5 | 17.5 | 14.5 | 16.0 | 15.9 | 14.4 | 15.0 | 14.5 | 14.3 | 14.2 | 16.1 | 13.5 | 12 |
| Roche | 2500 GE | | | | | | | | | | | | | |
| hgDNA | | | | | | | | | | | | | | |
| HT29 + | 10 GE + | No | 15.2 | No | 16.2 | No | 15.8 | 16.3 | No | 20.3 | 16.1 | No | No | 6 |
| Roche | 2500 GE | Ct | | Ct | | Ct | | | Ct | | | Ct | Ct | |
| hgDNA | | | | | | | | | | | | | | |
| Roche | 2500 GE | No | No | No | No | No | 38.5 | No | 36.8 | No | No | 37.7 | 36.6 | 0 |
| hgDNA | | Ct | Ct | Ct | Ct | Ct | | Ct | | Ct | Ct | | | |
| NTC | No Ct | No | 37.6 | No | 37.9 | 38.3 | No | No | No | 36.8 | 38.0 | 39.5 | No | 0 |
| | | Ct | | Ct | | | Ct | Ct | Ct | | | | Ct | |

### Example 2: Multiplexed Detection of 10 CRC Methylation Markers by PCR-LDR-qPCR on Bisulfite Converted HT29 Cell Line DNA

[0416] The experiment started with 500 ng of HT29 cell line genomic DNA digested with 12 units of the restriction enzyme Bsh1236I, in 20 μl of reaction solution containing 1×CutSmart buffer (50 mM Potassium Acetate, 20 mM Tris-Acetate, 10 mM Magnesium Acetate, 100 μg/ml BSA, pH 7.9 at 25° C.). The digestion reactions were carried out at 37° C. for 1 hour, followed by enzyme inactivation at 80° C. for 20 min.

[0417] For the bisulfate conversion reaction, 130 μl of Lightning Conversion Reagent (EZ DNA Methylation-Lightning kit from Zymo Research Corporation; Irvine, Calif.) was first added to 20 μl of digested genomic DNA. This is followed by incubation at 98° C. for 8 minutes, 54° C. for one hour, and stopped at 4° C. 600 μl of M-Binding Buffer was then added to a Zymo-Spin™ column placed inside a collection tube. 150 μl of digested DNA reaction mixture was then loaded into the Zymo-Spin IC column (containing the M-Binding Buffer), capped, and the solution mixed by inverting the column several times. After centrifugation at full speed (>10,000×g) for 30 sec, the flow through was discarded. 100 μl of M-Wash buffer was added to the column, followed by another round of centrifugation (full speed for 30 seconds). After discarding the flow through, 200 μl of L-Desulfonation Buffer was added into the column, which was allowed to stand at room temperature for 15-20 minutes, prior to centrifugation at full speed for 30 seconds. 200 μl of M-Wash Buffer was added anew, followed by centrifugation at full speed for 30 seconds, and discarding the flow through. This wash step cycle was repeated once. The column was placed into a 1.5 ml micro centrifuge tube, to which 10 μl of M-Elution buffer was added, followed by full speed (30 s) centrifugation to elute the DNA.

[0418] Most of the primers used in this particular experiment were purchased from Integrated DNA Technologies Inc. (IDT; Coralville, Iowa). The primers LNA1 and LNA2 were purchased from Exiqon Inc. (Woburn, Mass.), while the primer PNA was purchased from PNA Bio (Thousand Oaks, Calif.). The following primer sequences from Table 45 were used in PCR-LDR-qPCR multiplex methylation assays for 10 genes using HT29 cell line DNA as template: SEQ ID NOs.:1, 2, and 6-75.

[0419] PCR reaction. The PCR reaction was performed by mixing the following (in a 10 μl volume): 2 μl of Gotaq Flexi buffer 5× without Magnesium (Promega, Madison, Wis.), 0.8 μl of MgCl₂ at 25 mM (Promega, Madison, Wis.), 0.2 μl of dNTPs (with dATP, dCTP, dGTP and dUTP; 10 mM each) (Promega, Madison, Wis.), 0.125 μl of 10 specific forward and reverse primers at 4 μM each. 0.625 μl of Blocker at 4 μM (if available), 0.25 μl of RNAseH2 (IDT) at 20 mU/μl (diluted in RNAseH2 dilution buffer from IDT original RNAseH2 at 2 U/μl), 0.22 μl of Klentaql polymerase (DNA Polymerase Technology, St. Louis, Mo.) mixed with Platinum Taq Antibody (Invitrogen/Thermo Fisher, Waltham, Mass.) (the mixture is prepared by adding 0.02 μl of Klentaql polymerase at 50 U/μl to 0.2 μl of Platinum Taq Antibody at 5 U/μl), DNA template: (1) 10 ng of bisulfite converted HT29 DNA, (2) 0.07 ng of bisulfite converted HT29 DNA and 10 ng bisulfite converted normal DNA, (3) 10 ng bisulfite converted normal DNA. PCR reactions were carried out in a ProFlex PCR system thermocycler (Applied Bio-systems/ThermoFisher, Waltham, Mass.) and run with the following program: 94° C. for 2 min, 40 cycles of (20 sec at 94° C., 40 sec at 60° C. and 30 sec at 72° C.), 10 min at 99.5° C. to inactivate Klan Taq Polymerase, and a final hold at 4° C.

[0420] LDR Step.

[0421] The LDR step was performed in a 10 μl reaction prepared by adding: 2.02 μl of nuclease free water (IDT), 1 μl of 10×AK16D ligase reaction buffer [1× buffer contains 20 mM Tris-HCl, pH 8.5 (Bio-Rad, Hercules, Calif.), 5 mM MgCl₂ (Sigma-Aldrich, St. Louis, Mo.), 50 mM KCl (Sigma-Aldrich, St. Louis, Mo.), 10 mM DTT (Sigma-Aldrich, St. Louis, Mo.) and 20 μg/ml of BSA (Sigma-Aldrich, St. Louis, Mo.)], 0.25 μl of DTT (Sigma-Aldrich, St. Louis, Mo.) at 40 mM, 0.2 μl of NAD+ (Sigma-Aldrich, St. Louis, Mo.) at 50 mM, 0.25 μl of RNAseH2 (IDT) at 20 mU/μ1, 0.2 μl of corresponding 10 gene LDR upstream probes at 500 nM, 0.2 μl of corresponding 10 gene LDR downstream probes at 500 nM, 0.284 μl of purified AK16D ligase at 0.88 μM, and 2 μl of PCR reaction products from previous step. LDR reactions were run in a ProFlex PCR system thermocycler (Applied Biosystems/ThermoFisher; Waltham, Mass.) using the following program: 20 cycles of (10 sec at 94° C., and 4 min at 60° C.) followed by a hold at 4° C.

[0422] qPCR Step.

[0423] The qPCR reactions were performed as uniplex, wherein each reaction mixture contains only one set of gene-specific primers and probe. A 10 μl reaction mixture was prepared by mixing: 1.5 μl of nuclease free water (IDT), 5 μl of 2×TaqMan® Fast Universal PCR Master Mix (Fast amplitaq, UDG and dUTP) from Applied Biosystems (Applied Biosystems/ThermoFisher; Waltham, Mass.), 1 μl of TaqMan™ Assay forward primer at 2.5 μM, 1 μl of Taqman™ reverse primer at 2.5 μM, 0.5 μl of Taqman™ probe at 5 μM, and 1 μl of LDR reaction products. qPCR reactions were run in a ViiA7 real-time thermo-cycler from Applied Biosystems (Applied Biosystems/Thermo-Fisher; Waltham, Mass.), using MicroAmp® Fast-96-Well Reaction 0.1 ml plates sealed with MicroAmp™ Optical adhesive film (Applied Biosystems/ThermoFisher; Waltham, Mass.), with the following setting: fast block, Standard curve as experiment type, ROX as passive reference, Ct as quantification method (automatic threshold, but adjusted to 0.05 when needed), TAMRA as reporter, and NFQ-MGB as quencher. The specific program used was the following: 2 min at 50° C., and 45 cycles of (1 sec at 95° C., and 20 sec at 60° C.). Results are shown in FIG. 73 and Ct Values are shown in Table 59.

TABLE 59
Ct Values for Genes Assayed in Example 2.

| | CLIP4- | GSG1L- | | | | LONF | TBC1D10C- | GDF6- | CLIP4- | SEPT9- |
|---|---|---|---|---|---|---|---|---|---|---|
| Ct Value | R-S1 | F-S1 | PP1R16B | KCNA3 | VIM-S3 | R2-R-S1 | F-S1 | F-S1 | F-S2 | F-S1 |
| 10 ng | 7.2 | 9.1 | 15.8 | 19.6 | 19.7 | 25.1 | 14.2 | 17.3 | 20.9 | 11.2 |
| HT29 | | | | | | | | | | |
| DNA | | | | | | | | | | |
| 0.07 ng | 10.2 | 18.8 | 23.2 | 27.8 | 27.4 | 31.9 | 15.6 | 26.6 | 27.9 | 17.4 |
| HT29 | | | | | | | | | | |
| DNA + | | | | | | | | | | |
| 10 ng | | | | | | | | | | |
| Roche | | | | | | | | | | |
| 10 ng | No Ct | No Ct | 35.6 | 35.8 | No Ct | 38.4 | 36.7 | No Ct | No Ct | No Ct |
| Roche | | | | | | | | | | |
| DNA | | | | | | | | | | |
| NTC_PCR | No Ct | No Ct | 36.1 | 36.7 | No Ct | No Ct | No Ct | No Ct | No Ct | No Ct |
| NTC_LDR | No Ct | 38.2 | 36.0 | No Ct | No Ct | No Ct | No Ct | No Ct | No Ct | 37.7 |
| NTC_Taq | No Ct | No Ct | No Ct | No Ct | No Ct | No Ct | No Ct | No Ct | No Ct | No Ct |
| Man ™ | | | | | | | | | | |

Note:
NTC: No Template Control

### Example 3: Multiplexed Detection of 7 CRC Methylation Markers Using ex-PCR-LDR-qPCR on Bisulfite Converted HT29 Cell Line DNA

[0424] In a 20 μl reaction volume, 500 ng HT29 cell line genomic DNA was mixed with 12 units of restriction enzyme Bsh1236I, in 1×CutSmart buffer (50 mM Potassium Acetate, 20 mM Tris-Acetate, 10 mM Magnesium Acetate, 100 μg/ml BSA, pH7.9@25° C.). This digestion reactions were carried out at 37° C. for 1 hour, followed by enzyme inactivation at 80° C. for 20 min. Bisulfite conversion was carried out using the Cells-to-CpG Bisulfite Conversion kit from Applied Biosystem Corporation (Carlsbad, Calif.). For this reaction, 5 μl of Denaturation Reagent was added to 45 μl of restriction digested or methyl enriched genomic DNA, and the mixture was incubated at 50° C. for 10 min (to denature the DNA). 100 μl of Conversion Reagent was added to the mixture, followed by incubation in a thermal cycler with the following cycling conditions: 65° C. 30 min, 90° C. 30 sec, 65° C. 30 min, 90° C. 30 sec, 65° C. 30 min. 150 μl of the bisulfite converted DNA mixture was then mixed with 600 μl of binding buffer in the binding Column. The column was centrifuged at 10,000 rpm for 1 min, and the flow through discarded thereafter. The column was then washed with 600 μl of washing buffer. This was followed with addition of 200 μl of Desulfonation Reagent, and the column incubation at room temperature for 15 min. After spinning, the column was washed again with 400 μl of washing buffer. 50 μl of Elution Buffer was then added to the column to elute the DNA. Since the eluted bisulfite converted DNA was mostly single stranded DNA, it was quantified using Quant-iT Oli Green and Pico Green kits (Life Technologies/ThermoFisher; Waltham, Mass.).

[0425] The necessary primers were mostly purchased from Integrated DNA Technologies Inc. (IDT; Coralville, Iowa). The LNA1 and LNA2 primers were purchased from Exiqon Inc. (Woburn, Mass.), while the PNA primer, which was purchased from PNA Bio (Thousand Oaks, Calif.). The following primer sequences from Table 45 were used in Example 3: SEQ ID NOs.:1, 2, 6-39, 54-60, and 68-75.

[0426] Linear Amplification Step.

[0427] The Linear Amplification step was performed in a 25 μl of reaction mixture with: 5 μl of Gotaq Flexi buffer 5× without Magnesium (Promega, Madison, Wis.), 2.5 μl of MgCl₂ at 25 mM (Promega, Madison, Wis.), 0.5 μl of dNTPs (with dATP, dCTP, dGTP and dTTP, 10 mM each) (Promega, Madison, Wis.), 1.25 μl of 7 plex gene specific one direction primers (concentration of primer for each gene is 2 μM), 0.625 μl of RNAseH2 (IDT) at 20 mU/μl (diluted in RNAseH2 dilution buffer from IDT), and 0.55 μl of Klentaql polymerase (DNA Polymerase Technology, St. Louis, Mo.) mixed with Platinum Taq Antibody (Invitrogen/Thermo Fisher, Waltham, Mass.) (the mixture is prepared by adding 0.02 μl of Klentaql polymerase at 50 U/μl to 0.2 μl of Platinum Taq Antibody at 5 U/μl), and 14.5 μl of corresponding bisulfite converted genomic DNA (out of 50 μl of eluted DNA after bisulfite conversion.) DNA templates were: (1) 10 ng of bisulfite converted HT29 DNA, (2) 0.1 ng bisulfite converted HT29 mixed with 10 ng bisulfite converted Normal DNA from Roche, (3) 10 ng bisulfite converted Normal DNA from Roche. Linear Amplification reactions were run in a ProFlex PCR system thermocycler (Applied Biosystems/ThermoFisher, Waltham, Mass.) and run with the following program: 2 min at 94° C., 40 cycles of (20 sec at 94° C., 40 sec at 60° C. and 30 sec at 72° C.), a final hold at 4° C. After the reaction, Platinum Taq antibodies were added in the reaction mixture to inhibit the Klentaq DNA polymerase.

[0428] PCR Reaction.

[0429] The linear amplification products were equally divided into two parts (4-plex for 4 CpG markers, and 3-plex for 3 CpG markers). The PCR step was performed in a 20 μl reaction volume by prepared by mixing: 2 μl of 5× GoTaq Flexi buffer without Magnesium (Promega, Madison, Wis.), 1 μl of MgCl₂ at 25 mM (Promega, Madison, Wis.), 0.4 μl of dNTPs (with 10 mM each for dATP, dCTP, dGTP and dUTP) (Promega, Madison, Wis.), 1 μl of each of the opposite-strand PCR primer (2 μM concentration), 0.4 μl of Antarctic Thermolabile UDG (1 u/μl)(New England Biolab, Ipswich, Mass.), 0.25 μl of RNAseH2 (IDT) at 20 mU/μl, 0.44 μl of Klentaql polymerase (DNA Polymerase Technology, St. Louis, Mo.) mixed with Platinum Taq Antibody (Invitrogen/Thermo Fisher, Waltham, Mass.) (the mixture is prepared by adding 0.02 μl of Klentaql polymerase at 50 U/μl to 0.2 μl of Platinum Taq Antibody at 5 U/μl), and 12 μl of corresponding linear amplification products. PCR reactions were run in a ProFlex PCR system thermocycler (Applied Biosystems/ThermoFisher, Waltham, Mass.) with the following program: 10 min at 37° C., 40 cycles of (20 sec at 94° C., 40 sec at 60° C. and 30 sec at 72° C.), 10 min at 99.5° C., and a final hold at 4° C.

[0430] LDR Step.

[0431] The LDR step was performed in a 20 μl of reaction volume by mixing: 11.6 μl of nuclease free water (IDT), 2 μl of 10× AK16D ligase reaction buffer [1× buffer contains 20 mM Tris-HCl pH 8.5 (Bio-Rad, Hercules, Calif.), 5 mM MgCl₂ (Sigma-Aldrich, St. Louis, Mo.), 50 mM KCl (Sigma-Aldrich, St. Louis, Mo.), 10 mM DTT (Sigma-Aldrich, St. Louis, Mo.) and 20 μg/ml of BSA (Sigma-Aldrich, St. Louis, Mo.), 0.5 μl of DTT (Sigma-Aldrich, St. Louis, Mo.) at 40 mM, 0.4 μl of NAD+(Sigma-Aldrich, St. Louis, Mo.) at 50 mM, 0.5 μl of RNAseH2 (IDT) at 20 mu/μ1, 0.4 μl of corresponding 4 plex LDR upstream probes at 500 nM, 0.4 μl of corresponding 4 plex LDR downstream probes at 500 nM, (3 plex for the other LDR reaction), 0.57 μl of purified AK16D ligase at 0.88 μM, and 4 μl of corresponding PCR reaction products from previous step. LDR reactions were run in a ProFlex PCR system thermocycler (Applied Biosystems/ThermoFisher; Waltham, Mass.) using the following program: 20 cycles of (10 sec at 94° C., and 4 min at 60° C.) followed by a final hold at 4° C.

[0432] qPCR Step.

[0433] Uni-plex qPCR reactions (i.e. each reaction tube contains only the primers and probe specific to a unique CpG site) were performed in a 10 μl reaction mixture containing: 3 μl of nuclease free water (IDT), 5 μl of 2×TaqMan™ Fast Universal PCR Master Mix (Fast Amplitaq, UDG and dUTP) from Applied Biosystems (Applied Biosystems/ThermoFisher; Waltham, Mass.), 0.5 μl of mixture of TaqMan™ Assay forward and reverse primers at 5 μM each, 0.5 μl of Taqman™ probe at 5 μM, and 1 μl of corresponding LDR reaction products. The reactions were run in a ViiA7 real-time thermo-cycler from Applied Biosystems (Applied Biosystems/ThermoFisher; Waltham, Mass.), using MicroAmp® Fast-96-Well Reaction 0.1 ml plates sealed with MicroAmp™ Optical adhesive film (Applied Biosystems/ThermoFisher; Waltham, Mass.), with the following setting: fast block, Standard curve as experiment type, ROX as passive reference, Ct as quantification method (automatic threshold, but adjusted to 0.05 when needed), TAMRA as reporter, and NFQ-MGB as quencher. The thermocycler was programmed as follows: 2 min at 50° C., and 45 cycles of (1 sec at 95° C., and 20 sec at 60° C.). The Ct plots and values are shown in FIG. 74 and Ct Table 60, respectively.

TABLE 60
Ct Values for 7 Genes in Example 3.

| | | 01 ng | | | | |
|---|---|---|---|---|---|---|
| | | HT29 + 10 | 10 ng | | | |
| | 10 ng | ng Roche | Roche | | | |
| CT Values | HT29 | Normal | Normal | NTC_PCR | NTC_LDR | NTC_TaqMan ™ |
| VIM-S3 | 5.9 | 9.1 | No Ct | No Ct | No Ct | No Ct |
| CLIP4-R-S1 | 6.7 | 7.0 | 31.8 | 31.9 | 31.5 | No Ct |
| GSG1L-F-S1 | 4.9 | 5.6 | No Ct | No Ct | No Ct | No Ct |
| PP1R16B-F-S1 | 4.7 | 8.7 | 34.3 | 35.7 | 36.0 | No Ct |
| KCNA3-F-S1 | 5.4 | 5.5 | 25.0 | 30.5 | 37.1 | No Ct |
| GDF6-F-S1 | 6.8 | 8.2 | 7.3 | NO Ct | No Ct | No Ct |
| SEPT9-F-S1 | 5.3 | 5.5 | No Ct | No Ct | No Ct | No Ct |

### Example 4: Multiplexed Detection of 7 CRC Methylation Markers Using Ex-PCR-LDR-qPCR on Bisulfite Converted Cell Free DNA in Tumor Plasma

[0434] Human plasma (with K2-EDTA as an anti-coagulant) samples were purchased from a vendor. Cell free DNA was isolated from individual plasma samples (5 mL) using the QIA amp Circulating Nucleic Acid Kit (Qiagen) according to manufacturer's instructions, and quantified with Quant-iT Pico Green Assay Life Technologies/Thermo-Fisher; Waltham, Mass.). CpG Methylated cell free DNA fragments were enriched by antibodies containing methyl-CpG binding domain. A series of wash steps, magnetic capture, and incubation at 65° C., were employed prior to elution of methylation-enriched cell free DNA.

[0435] Bisulfite conversion of enriched methylated cell free DNA was carried out using the innuCONVERT bisulfate Body Fluids kit from Analytic Jena Corporation (Jena, Germany). Conversion reaction was carried out in 150 μl of mixture by adding 50 μl of enriched cell free DNA, 70 μl of Conversion Reagent, 30 μl of Conversion Buffer. The mixture was incubated in a thermal mixer at 85° C. for 45 min, with shaking at 800 rpm speed. After incubation, 700 μl of binding buffer was added to the reaction mixture, prior to being loaded into a spin column, then centrifuged. 200 μl of washing solution BS was then added to the column, prior to centrifugation. This is followed by addition of 700 μl of desulfonation buffer to the column, and incubation at room temperature for 10 minutes. The column was then subjected to a series of wash steps: 500 μl of washing solution C, 650 μl of washing solution BS, 650 μl of ethanol (twice). The column was then incubated at 60° C. for 10 min to remove residue ethanol. The DNA was finally eluted with 50 μl of elution buffer.

[0436] The primers used for the example described above were identical to those used in Example 3. The linear amplification, PCR, LDR and qPCR steps were carried out as described in Example 3. Three sets of cell free DNA samples (a set consists of CRC patient/normal pair) were tested using this protocol. The results using cfDNA isolated from the plasma of 3 different CRC patients and 3 different normal controls are shown in FIGS. 75, 76, and 77.

### Example 5: Multiplexed Detection of 20 CRCM Markers Using ex-PCR-LDR-qPCR on Bisulfite Converted HT29 Cell Line DNA

[0437] The template for this particular example was also the genomic DNA extracted from HT29, and fragmented though Non Random Sonication method using ultra-sonicator from Covaris (Woburn, Mass.). After shearing, DNA quality was assessed with an Agilent Bioanalyzer system. The length of DNA ranged from 50 bp to 1 kb. DNA in the elution buffer was quantified using Pico Green kit (Life Technologies/Thermo-Fisher; Waltham, Mass.).

[0438] DNA fragments containing methylated CpG sites were enriched by binding to the antibodies containing methyl-CpG binding domain. After a series of wash steps followed by magnetic capture, the enriched DNA sample is eluted in a small volume of water by incubation at 65° C.

[0439] Bisulfite conversion was then carried out using the Cells-to-CpG Bisulfite Conversion kit from Applied Biosystem division of ThermoFisher (Carlsbad, Calif.). 5 μl of Denaturation Reagent was added to 45 μl of methyl enriched genomic DNA, followed by the mixture's incubation at 50° C. for 10 min. This is followed by addition of 100 μl of Conversion Reagent, and incubation in a thermal cycler with the following program: 65° C. 30 min, 90° C. 30 sec, 65° C. 30 min, 90° C. 30 sec, 65° C. 30 min. 150 μl of converted DNA mixture was mixed with 600 μl of binding buffer in the binding Column. The column was centrifuged at 10,000 rpm for 1 min, followed by discarding the flow through. The column was washed with 600 μl of washing buffer. 200 μl of Desulfonation Reagent was added to the column, followed by incubation at room temperature for 15 min. After spinning, the column was washed again with 400 μl of washing buffer. 50 μl of Elution Buffer was then added to the column to elute the bound DNA. The mostly single stranded, bisulfite converted DNA was quantified with both Quant-iT Oli Green and Pico Green kit (Life Technologies/ThermoFisher; Waltham, Mass.).

[0440] All primers used in the preceding example were purchased from Integrated DNA Technologies Inc. (IDT; Coralville, Iowa). The following primer sequences from Table 45 were used in Example 5: SEQ ID NOs.: 76-235.

[0441] Linear Amplification Step.

[0442] In a 25 μl of reaction volume, the linear amplification step was performed by mixing: 5 μl of 5× GoTaq Flexi buffer (no Magnesium) (Promega, Madison, Wis.), 2.5 μl of 25 mM MgCl₂ (Promega, Madison, Wis.), 0.5 μl of 10 mM dNTPs (dATP, dCTP, dGTP and dTTP) (Promega, Madison, Wis.), 2.5 μl of 20 plex gene specific reverse primers (concentration of each primer is 1 μM), 0.625 μl of 20 mU/μl RNAseH2 (diluted in RNAseH2 dilution buffer from IDT) (DT), and 0.55 μl of Klentaql polymerase (DNA Polymerase Technology, St. Louis, Mo.) mixed with Platinum Taq Antibody (Invitrogen/Thermo Fisher, Waltham, Mass.) (the mixture is prepared by adding 0.02 μl of Klentaql polymerase at 50 U/μl to 0.2 μl of Platinum Taq Antibody at 5 U/μl), and 5.0 μl of corresponding bisulfite converted genomic DNA (out of 50 μl of eluted DNA after bisulfite conversion.) The template was either: 1) 1.0 μg of Normal Human genomic DNA (purchased from Roche) mixed with 66.0 ng of HT29 colorectal cell line genomic DNA, or 2) just 1.0 μg of Normal Human genomic DNA (normal control). The template was either digested with restriction enzyme Bsh1236I, or enriched in methylated DNA, bisulfite converted, and eluted into 50 μl of elution buffer. 5 μl of elution buffer was used in the linear amplification reaction. The reactions were run in a ProFlex PCR system thermocycler (Applied Biosystems/ThermoFisher, Waltham, Mass.) using the following program: 2 min at 94° C., 40 cycles of (20 sec at 94° C., 40 sec at 60° C., and 30 sec at 72° C.), and a final hold at 4° C. After the reaction, Platinum Taq Antibodies were added in the reaction mixture to inhibit the Klentaq DNA polymerase.

[0443] PCR Reaction.

[0444] The linear amplification products were equally divided into two parts. In the 1^{st} part, first 10 plex (out of 20 plex) gene specific forward primers and other reagents were added, in the 2^{nd} part, the other 10 plex (out of 20 plex) gene specific forward primers and other reagents were added. Two 10 plex PCR reactions were carried out. The PCR step was performed in a 20 μl of reaction mixture prepared by adding: 2 μl of GoTaq Flexi buffer 5× without Magnesium (Promega, Madison, Wis.), 1 μl of MgCl2 at 25 mM (Promega, Madison, Wis.), 0.4 μl of dNTPs (with dATP, dCTP, dGTP and dUTP, 10 mM each) (Promega, Madison, Wis.), 2 μl of 10 plex (out of 20 plex in linear amplification step) gene specific forward primers at 0.5 μM each. 0.4 μl of Antarctic Thermolabile UDG (1 u/μl) (New England Biolab, Ipswich, Mass.), 0.25 μl of RNAseH2 (IDT) at 20 mU/μl, 0.44 μl of Klentaql polymerase (DNA Polymerase Technology, St. Louis, Mo.) mixed with Platinum Taq Antibody (Invitrogen/Thermo Fisher, Waltham, Mass.) (The mixture is prepared by adding 0.02 μl of Klentaql polymerase at 50 U/μl to 0.2 μl of Platinum Taq Antibody at 5 U/μl), and 10 μl of corresponding linear amplification products. PCR reactions were run in a ProFlex PCR system thermocycler (Applied Biosystems/ThermoFisher, Waltham, Mass.) and using the following program: 10 min at 37° C., 40 cycles of (20 sec at 94° C., 40 sec at 60° C. and 30 sec at 72° C.), 10 min at 99.5° C., and a final hold at 4° C.

[0445] LDR Step.

[0446] The LDR step was performed in a 20 μl reaction prepared by combining: 5.82 μl of nuclease free water (IDT), 2 μl of 10× AK16D ligase reaction buffer [1× buffer contains 20 mM Tris-HCl pH 8.5 (Bio-Rad, Hercules, Calif.), 5 mM MgCl₂ (Sigma-Aldrich, St. Louis, Mo.), 50 mM KCl (Sigma-Aldrich, St. Louis, Mo.), 10 mM DTT (Sigma-Aldrich, St. Louis, Mo.) and 20 μg/ml of BSA (Sigma-Aldrich, St. Louis, Mo.), 0.5 μl of 40 mM DTT (Sigma-Aldrich, St. Louis, Mo.), 0.25 μl of 40 mM NAD+(Sigma-Aldrich, St. Louis, Mo.), 0.5 μl of 20 mU/μl RNAseH2 (IDT), 0.4 μl of corresponding 10 plex LDR upstream probes at 500 nM each, 0.4 μl of corresponding 10 plex LDR downstream probes at 500 nM each, 0.57 μl of purified AK16D ligase (at 0.88 μM), and 4 μl of PCR reaction products from previous step. LDR reactions were run in a ProFlex PCR system thermocycler (Applied Biosystems/Thermo-Fisher; Waltham, Mass.) using the following program: 20 cycles of (10 sec at 94° C., and 4 min at 60° C.) followed by a final hold at 4° C.

[0447] qPCR Step.

[0448] The qPCR step was performed in a 10 μl of reaction volume by combining: 1.5 μl of nuclease free water (IDT), 5 μl of 2×TaqMan™ Fast Universal PCR Master Mix (Fast amplitaq, UDG and dUTP) from Applied Biosystems (Applied Biosystems/ThermoFisher; Waltham, Mass.), 1 μl of 2.5 μM TaqMan™ Assay forward primer, 1 μl of 2.5 μM Taqman™ reverse primer, 0.5 μl of 5 μM Taqman™ probe, and 1 μl of LDR reaction products. qPCR reactions were run in a ViiA7 real-time thermo-cycler from Applied Biosystems (Applied Biosystems/Thermo-Fisher; Waltham, Mass.), using MicroAmp® Fast-96-Well Reaction 0.1 ml plates sealed with MicroAmp™ Optical adhesive film (Applied Biosystems/ThermoFisher; Waltham, Mass.), with the following setting: fast block, Standard curve as experiment type, ROX as passive reference, Ct as quantification method (automatic threshold, but adjusted to 0.05 when needed), TAMRA as reporter, and NFQ-MGB as quencher. The program employed was: 2 min at 50° C., and 45 cycles of (1 sec at 95° C., and 20 sec at 60° C.). Results are shown in FIG. 78, and Table 61 below.

TABLE 61
Ct values for each gene in Example 5.

| | Ct Values | | | | | | | | | |
|---|---|---|---|---|---|---|---|---|---|---|
| | 1 | 2 | 3 | 4 | 5 | 6 | 7 | 8 | 9 | 10 |
| | Gene | | | | | | | | | |
| | GATA5- | ZNF542- | RCN- | MYO15B- | ANKRD13B- | FAM115A- | RGS10- | HCG4- | STK32B- | CNRIP1- |
| | S2 | S1 | 3-S1 | S1 | S1 | S1 | S1 | S1 | S1 | S1 |
| starting | 5421 | 5431 | 5441 | 5451 | 5461 | 5471 | 5491 | 5501 | 5511 | 5521 |
| number | | | | | | | | | | |
| for primer | | | | | | | | | | |
| 1,000 GE of | 17.0 | 12.6 | 12.6 | 10.0 | 12.9 | 16.5 | 8.8 | 10.9 | 6.6 | 11.0 |
| HT29 DNA + | | | | | | | | | | |
| 7,500 GE of | | | | | | | | | | |
| Roche DNA | | | | | | | | | | |
| 7,500 GE of | 34.2 | 39.4 | 39.8 | No Ct | 37.5 | 24.7 | No Ct | 35.7 | 31.4 | 35.7 |
| Roche DNA | | | | | | | | | | |
| 1st Linaer | 34.4 | 39.6 | 39.6 | 36.3 | No Ct | No Ct | No Ct | 37.0 | 31.6 | 38.4 |
| Amp_NTC | | | | | | | | | | |
| 2nd Linear | 32.6 | 36.6 | 37.9 | 38.3 | No Ct | No Ct | No Ct | 36.4 | 32.2 | 33.5 |
| Amp_NTC | | | | | | | | | | |
| LDR_NTC | 34.2 | 44.8 | 35.7 | 37.9 | 37.1 | No Ct | 37.6 | 35.5 | 31.1 | 32.4 |
| TaqMan ™_NTC | No Ct | No Ct | No Ct | No Ct | No Ct | No Ct | No Ct | No Ct | No Ct | No Ct |

| | 11 | 12 | 13 | 14 | 15 | 16 | 17 | 18 | 19 | 20 |
|---|---|---|---|---|---|---|---|---|---|---|
| | Gene | | | | | | | | | |
| | VIM-S1 | CLIP4-S1 | GSG1L-S1 | PP1R16B-S1 | KCNA3 | GDF6-S1 | ADHFE1-S1 | THBD-S1 | SEPT9-S4 | SEMA3B-S1 |
| starting | 5001 | 5021 | 5051 | 5061 | 5071 | 5081 | 5101 | 5331 | 5351 | 5401 |
| number | | | | | | | | | | |
| for primer | | | | | | | | | | |
| 1,000 GE of | 10.4 | 5.7 | 7.7 | 17.9 | 11.2 | 14.2 | 17.5 | 30.0 | 7.2 | 9.2 |
| HT29 DNA + | | | | | | | | | | |
| 7,500 GE of | | | | | | | | | | |
| Roche DNA | | | | | | | | | | |
| 7,500 GE of | 17.6 | No Ct | 36.6 | 36.5 | 36.8 | 32.7 | 36.7 | No Ct | 31.2 | No Ct |
| Roche DNA | | | | | | | | | | |
| 1st Linaer | No Ct | No Ct | 36.8 | 36.3 | No Ct | 32.8 | 35.1 | No Ct | 31.5 | 41.4 |
| Amp_NTC | | | | | | | | | | |
| 2nd Linear | No Ct | No Ct | No Ct | 35.1 | No Ct | 33.3 | 36.8 | No Ct | 31.2 | No Ct |
| Amp_NTC | | | | | | | | | | |
| LDR_NTC | No Ct | No Ct | No Ct | 36.7 | No Ct | 32.6 | 38.3 | No Ct | 30.7 | 39.8 |
| TaqMan ™_NTC | No Ct | No Ct | No Ct | No Ct | No Ct | No Ct | No Ct | No Ct | No Ct | No Ct |

### Example 6: Multiplexed Detection of 20 CRCM Markers Using ex-PCR-LDR-qPCR on Bisulfite Converted HT29 Cell Line DNA

[0449] General Methods:

[0450] HT-29 colon adenocarcinoma cells were seeded in 60 cm2 culture dishes in McCoy's 5A medium containing 4.5 g/l glucose, supplemented with 10% fetal calf serum, and kept in a humidified atmosphere containing 5% CO₂. Once cells reached 80-90% confluence, they were washed in Phosphate Buffered Saline (×3), and collected by centrifugation (500×g) Genomic DNA was isolated using the DNeasy Blood & Tissue Kit frpm QIAGEN (Qiagen, Valencia, Calif.), and its concentration was measured using Quant-iT Pico green ds DNA Assay kit (Thermo-Fisher, Waltham, Mass.). High molecular weight (>50 kb) genomic DNA (0.2 mg/ml) isolated from normal human blood (buffy coat) (Roche human genomic DNA) was purchased from Roche (Indianapolis, Ind.). Its concentration was similarly determined using Quant-iT PicoGreen dsDNA Assay Kit (Thermo-Fisher, Waltham, Mass.). 1.0 μg HT29 cell line genomic DNA or Roche Normal DNA was fragmented through non random sonication method, using Covaris ultra sonicator E220 (Covaris, Woburn, Mass.). After shearing, the quality of the resulting DNA fragments (length ranged from 50 to 1 kb base pairs) was assessed with Agilent Bioanalyzer system 2100 (Agilent, Santa Clara, Calif.).

[0451] Enrichment of Methylated DNA:

[0452] The DNA fragments containing methylated CpGs was captured by methylation-specific antibodies, using the EpiMark® Methylated DNA Enrichment Kit from New England Biolabs, according to manufacturer's instructions (New England Biolabs, Ipswich, Mass.). DNA fragments containing methylated CpG sites were enriched by binding to the antibodies containing methyl-CpG binding domain. After a series of wash steps followed by magnetic capture, the enriched DNA sample was eluted in a small volume of water by incubation at 65° C.

[0453] Bisulfite Conversion of DNA:

[0454] Bisulfite conversion of cytosine bases in DNA was then carried out using the Cells-to-CpG Bisulfite Conversion kit from Applied Biosystem division of ThermoFisher (ThermoFisher, Carlsbad, Calif.). 5 μl of Denaturation Reagent was added to 45 μl of methyl enriched genomic DNA, followed by the mixture's incubation at 50° C. for 10 min. After adding 100 μl of Conversion Reagent, the mixture was incubated in a thermal cycler with the following program: 65° C. 30 min, 90° C. 30 sec, 65° C. 30 min, 90° C. 30 sec, 65° C. 30 min. 150 μl of converted DNA mixture was mixed with 600 μl of binding buffer in the binding Column. The column was centrifuged at 10,000 rpm for 1 min, followed by discarding the flow through. The column was washed with 600 μl of washing buffer. 200 μl of Desulfonation Reagent was added to the column, followed by incubation at room temperature for 15 min. After spinning, the column was washed again with 400 μl of washing buffer. 50 μl of Elution Buffer was then added to the column to elute the bound DNA. The mostly single stranded, bisulfite converted DNA was quantified with both Quant-iT Oli Green ss DNA kit and Pico Green ds DNA kit (ThermoFisher, Waltham, Mass.).

[0455] PCR Primers, LDR Probes, and LNA or PNA Blocking Primers:

[0456] All primers used are listed in Table 45 above. All primers were purchased from Integrated DNA Technologies Inc. (IDT) (Coralville, Iowa). All primers used in the preceding example were purchased from Integrated DNA Technologies Inc. (IDT; Coralville, Iowa). The primer number ended with 02A has the same sequences of the primer end with 02, but it has no short (10-mer) 5′ end tail sequences.

[0457] Templates Preparation:

[0458] Template “A”: 1 ug of sonicated and methylation enriched Roche Normal DNA was mixed with 6.6 ng of sonicated HT29 DNA in 50 μl, 10 ng human genomic DNA equals to 3,000 genomic equivalent (GE). The yield of methylation enrichment is about 50%, and the bisulfite conversion is about 50%. So the template A contains 75,000 GE of Roche DNA and 2,000 GE of HT29 DNA in 50 μl. 5 ul of DNA template A was used in the linear amplification reaction, it contains 7,500 GE of Roche DNA and 200 GE of HT29 DNA, Template “B”: 1 μg of sonicated and methylation enriched Roche Normal DNA was bisulfite converted and it has 75,000 GE of Roche DNA in 50 μl.

In the following experiment, 5 μl of HT29 DNA will be used, and it contains 1,000 GE of HT29 and 7,500 GE of Roche DNA. 5 μl of DNA template B was used in the linear amplification reaction, it contains 7,500 GE of Roche normal DNA.

[0459] Linear Amplification Step: For condition A, In a 25 μl of reaction volume, the linear amplification step was performed by mixing: 5 μl of 5× Gotaq Flexi buffer (no Magnesium) (Promega, Madison, Wis.), 3.5 μl of 25 mM MgCl2 (Promega, Madison, Wis.), 0.5 μl of 10 mM dNTPs (dATP, dCTP, dGTP and dTTP) (Promega, Madison, Wis.), 2.5 μl of second set of 20 plex marker-specific reverse primers with 10-mer short tail (concentration of each primer is 0.5 μM, primer number ends with 02 has a short tail, a universal sequences), 0.5 μl of tween 20 (5%), 0.9 μl of 20 mU/μl RNAseH2 (diluted in RNAseH2 dilution buffer from IDT) (IDT), and 0.5 μl of Klentaql polymerase (50 U/μl)(DNA Polymerase Technology, St. Louis, Mo.) mixed with Platinum Taq Antibody (Invitrogen/Thermo Fisher, Waltham, Mass.) (The ratio of mixing of Klentaql polymerase with Antibody is 1:10, and the final concentration of Klentaql polymerase is 5 U/μl), and 5.0 μl of corresponding bisulfite converted methylated enriched genomic DNA (out of 50 μl of eluted DNA after bisulfite conversion.). For condition B, in the other 25 ul of reaction mixture, all the reagents were the same except 2.5 μl of second set of 20 plex marker-specific reverse primers with no tail (Primer number ending with 02A). The template was either: 1) 5 ul of template A it contains 200 GE of HT29 DNA and 7,500 GE of Roche DNA. 2) 5 ul of template B, it contains 7,500 GE of Roche DNA. The reactions were run in a ProFlex PCR system thermocycler (Applied Biosystems/ThermoFisher, Waltham, Mass.) using the following program: 2 min at 94° C., 40 cycles of (20 sec at 94° C., 40 sec at 60° C., and 30 sec at 72° C.), and a final hold at 4° C. After the reaction, 0.5 μl of Platinum Taq antibodies were added in the reaction mixture to inhibit the Klentaq DNA polymerase.

[0460] PCR Reaction:

[0461] The linear amplification products were equally divided into two parts with two 10-plex reaction being carried out. In the 1st part, first 10 plex (marker number 21 to number 30) marker-specific forward primers and other reagents were added, in the 2nd part, the second 10 plex (marker number 31 to number 40) marker specific forward primers and other reagents were added. The PCR step was performed in a 20 μl of reaction mixture prepared by adding: 2 μl of Gotaq Flexi buffer 5× without Magnesium (Promega, Madison, Wis.), 1.4 μl of MgCl₂ at 25 mM (Promega, Madison, Wis.), 0.4 μl of dNTPs (with dATP, dCTP, dGTP and dUTP, 10 mM each) (Promega, Madison, Wis.), 0.2 μl of tween 20 (5%), 2 μl of 10 plex (1st 10-plex and 2nd 10-plex) marker-specific forward primers at 0.25 μM each. 0.4 μl of Antarctic Thermolabile UDG (1 u/μl)(New England Biolab, Ipswich, Mass.), 0.29 μl of RNAseH2 (IDT) at 20 mU/μl, 1.6 μl of Klentaql polymerase (DNA Polymerase Technology, St. Louis, Mo.) mixed with Platinum Taq Antibody (Invitrogen/Thermo Fisher, Waltham, Mass.) (The ratio of mixing of Klentaql polymerase with Antibody is 1:10, and the final concentration of Klentaql polymerase is 5 U/μl), 10 μl of corresponding linear amplification products and 1.7 μl water. PCR reactions were run in a ProFlex PCR system thermocycler (Applied Biosystems/ThermoFisher, Waltham, Mass.) and using the following program: 10 min at 37° C., 50 cycles of (94° C. 10 s, 60° C. 30 s, 72° C. 20 s), 10 min at 99.5° C., and a final hold at 4° C.

[0462] LDR Step:

[0463] The LDR step was performed in a 20 μl of reaction mixture prepared by combining: 11.6 μl of nuclease free water (IDT), 2 μl of 10×AK16D ligase reaction buffer [1× buffer contains 20 mM Tris-HCl pH 8.5 (Bio-Rad, Hercules, Calif.), 5 mM MgCl₂ (Sigma-Aldrich, St. Louis, Mo.), 50 mM KCl (Sigma-Aldrich, St. Louis, Mo.), 10 mM DTT (Sigma-Aldrich, St. Louis, Mo.) and 20 μg/ml of BSA (Sigma Aldrich, St. Louis, Mo.)], 0.5 μl of 40 mM DTT (Sigma-Aldrich, St. Louis, Mo.), 0.4 μl of 50 mM NAD+ (Sigma-Aldrich, St. Louis, Mo.), 0.5 μl of 20 mU/μl RNAseH2 (IDT), 0.4 μl of corresponding 10 plex LDR upstream probes at 500 nM each, 0.4 μl of corresponding 10 plex LDR downstream probes at 500 nM each, 0.57 μl of purified AK16D ligase (at 0.88 μM), and 4 μl of PCR reaction products from previous step. LDR reactions were run in a ProFlex PCR system thermocycler (Applied Biosystems/Thermo-Fisher; Waltham, Mass.) using the following program: 20 cycles of (10 sec at 94° C., and 4 min at 60° C.) followed by a final hold at 4° C.

[0464] qPCR Step:

[0465] The qPCR reaction is run uni-plex with the qPCR step performed in a 10 μl of reaction volume by combining: 3 μl of nuclease free water (IDT), 5 μl of 2×TaqMan® Fast Universal PCR Master Mix (Fast amplitaq, UDG and dUTP) from Applied Biosystems (Applied Biosystems/ThermoFisher, Waltham, Mass.), 0.5 μl of a mixture of 5 μM TaqMan™ Assay one marker-specific forward primer and 5 μM of Taqman™ corresponding marker-specific reverse primer, 0.5 μl of 5 μM Taqman™ one marker-specific probe, and 1 μl of LDR 10-plex reaction products. qPCR reactions were carried out in a ViiA7 real-time thermo-cycler from Applied Biosystems (Applied Biosystems/Thermo-Fisher; Waltham, Mass.), using MicroAmp® Fast-96-Well Reaction 0.1 ml plates sealed with MicroAmp™ Optical adhesive film (Applied Biosystems/ThermoFisher; Waltham, Mass.), with the following setting: fast block, Standard curve as experiment type, ROX as passive reference, Ct as quantification method (automatic threshold, but adjusted to 0.05 when needed), TAMRA as reporter, and NFQ-MGB as quencher. The program employed was: 2 min at 50° C., and 45 cycles of (1 sec at 95° C., and 20 sec at 60° C.). Results are shown in FIGS. 79 and 80 and Table 62 below.

TABLE 62
Ct values for each gene in Example 6.

| | | CRC-Marker | | | | | | | | | |
|---|---|---|---|---|---|---|---|---|---|---|---|
| | | 1 | 2 | 3 | 4 | 5 | 6 | 7 | 8 | 9 | 10 |
| | | Gene | | | | | | | | | |
| | | IRF4 | TWIST1 | TDH | NCAM1 | COL4A2/1 | VSX1 | PTPRT | MIR124-3 | ZNF677 | EVC |
| Starting | RP02 | 5561 | 5571 | 5591 | 5621 | 5651 | 5661 | 5671 | 5681 | 5691 | 5701 |
| number | Status | | | | | | | | | | |
| for primer | | | | | | | | | | | |
| 200GE of | RP02 | 30.2 | 35.9 | 31.0 | 10.3 | 17.1 | 17.7 | 31.6 | 33.6 | 30.4 | 21.2 |
| HT29 + | with | | | | | | | | | | |
| 7,500 GE | Short | | | | | | | | | | |
| of Roche | Tail | | | | | | | | | | |
| 7,500 GE of | | No Ct | No Ct | 32.3 | 32.8 | 34.5 | 40.3 | 33.9 | 33.9 | 35.8 | 30.2 |
| Roche DNA | | | | | | | | | | | |
| 1st Linear | | No Ct | 39.0 | 32.5 | 33.2 | 35.5 | No Ct | 33.1 | 33.1 | 35.2 | 30.6 |
| Amplification_NTC | | | | | | | | | | | |
| 2nd | | No Ct | 37.5 | 32.3 | 33.1 | 34.2 | No Ct | 32.4 | 33.3 | 37.0 | 31.0 |
| PCR_NTC | | | | | | | | | | | |
| 200GE of | RP02A | 9.1 | 11.8 | 32.6 | 23.5 | 10.7 | 9.7 | 10.9 | 7.3 | 19.1 | 23.0 |
| HT29 + | without | | | | | | | | | | |
| 7,500 GE | Tail | | | | | | | | | | |
| of Roche | | | | | | | | | | | |
| 7,500 GE | | No Ct | 38.5 | 32.6 | 33.1 | 34.7 | No Ct | 8.3 | 33.2 | 36.3 | 24.9 |
| of Roche DNA | | | | | | | | | | | |
| 1st Linear | | No Ct | No Ct | 32.5 | 32.6 | 36.3 | No Ct | 32.8 | 33.8 | 34.8 | 30.8 |
| Amplification_NTC | | | | | | | | | | | |
| 2nd | | No Ct | 35.7 | 32.2 | 33.6 | 35.4 | No Ct | 33.1 | 32.9 | 37.0 | 31.2 |
| PCR_NTC | | | | | | | | | | | |

| | | CRC-Marker | | | | | | | | | |
|---|---|---|---|---|---|---|---|---|---|---|---|
| | | 11 | 12 | 13 | 14 | 15 | 16 | 17 | 18 | 19 | 20 |
| | | Gene | | | | | | | | | |
| | | | | | | | | | | SLC18A3, | |
| | | JAM2 | GFRA1 | FLI1 | GNAO1 | CoCaNCR2 | CoCaNCR9 | CoCaNCR10 | CoCaNCR8 | CHAT | LIFR |
| starting | RP02 | 5711 | 5721 | 5731 | 5741 | 5751 | 5761 | 5771 | 5781 | 5801 | 5811 |
| number | Status | | | | | | | | | | |
| for | | | | | | | | | | | |
| primer | | | | | | | | | | | |
| 200GE of | RP02 | 35.0 | 23.8 | 16.5 | No Ct | 20.5 | 14.4 | 16.1 | 19.1 | 35.8 | 16.9 |
| HT29 + | With | | | | | | | | | | |
| 7,500 GE | Short | | | | | | | | | | |
| of Roche | Tail | | | | | | | | | | |
| 7,500 GE of | | No Ct | 38.4 | 32.7 | No Ct | 38.2 | 36.0 | No Ct | 41.2 | 35.9 | No Ct |
| Roche DNA | | | | | | | | | | | |
| 1st Linear | | No Ct | 38.6 | 32.4 | No Ct | 41.6 | 35.6 | No Ct | 38.9 | 35.5 | No Ct |
| Amplification_NTC | | | | | | | | | | | |
| 2nd | | No Ct | 38.0 | 32.0 | No Ct | 40.6 | 37.4 | No Ct | 35.7 | 36.1 | No Ct |
| PCR_NTC | | | | | | | | | | | |
| 200GE of | RP02A | 16.1 | 10.9 | 10.7 | 21.5 | 18.2 | 6.9 | 29.7 | 9.2 | 29.9 | 9.5 |
| HT29 + | Without | | | | | | | | | | |
| 7,500 GE | Tail | | | | | | | | | | |
| of Roche | | | | | | | | | | | |
| 7,500 GE of | | No Ct | 21.6 | 32.7 | 11.7 | 37.8 | 7.8 | No Ct | No Ct | 41.5 | No Ct |
| Roche DNA | | | | | | | | | | | |
| 1st Linear | | No Ct | 39.2 | 32.6 | No Ct | 39.7 | 39.4 | No Ct | No Ct | 35.4 | No Ct |
| Amplification_NTC | | | | | | | | | | | |
| 2nd | | No Ct | 35.3 | 32.8 | No Ct | 37.9 | 38.3 | No Ct | 37.3 | 36.6 | No Ct |
| PCR_NTC | | | | | | | | | | | |

[0466] Although preferred embodiments have been depicted and described in detail herein, it will be apparent to those skilled in the relevant art that various modifications, additions, substitutions, and the like can be made without departing from the spirit of the present application and these are therefore considered to be within the scope of the present application as defined in the claims which follow.

LENGTHY TABLES
The patent application contains a lengthy table section. A copy of the table is available in electronic form from the USPTO web site (https://seqdata.uspto.gov/?pageRequest=docDetail&DocID=US20220243263A1). An electronic copy of the table will also be available from the USPTO upon request and payment of the fee set forth in 37 CFR 1.19(b)(3).

The application's sequence listing, which the Patent Office published only in electronic form, follows.

SEQUENCE LISTING (4531 sequences)

SEQ ID NO: 1 - DNA, 28 bp, Artificial Sequence
  Description of Artificial Sequence: Synthetic primer
  Description of Combined DNA/RNA Molecule: Synthetic primer
gaactccaaccgaaactacgtaactaca

SEQ ID NO: 2 - DNA, 33 bp, Artificial Sequence
  Description of Artificial Sequence: Synthetic primer
  Description of Combined DNA/RNA Molecule: Synthetic primer
ggtgtcgtggacgaggcgtagaggttgcggtta

SEQ ID NO: 3 - DNA, 51 bp, Artificial Sequence
  Description of Artificial Sequence: Synthetic oligonucleotide
  Description of Combined DNA/RNA Molecule: Synthetic oligonucleotide
tagacacgagcgaggtcacaactccaaccgaaactacgtaactgcguccgt

SEQ ID NO: 4 - DNA, 50 bp, Artificial Sequence
  Description of Artificial Sequence: Synthetic oligonucleotide
tccacccgcacctacaacctaaacaacgcgtgcaaaattcaggctgtgca

SEQ ID NO: 5 - DNA, 25 bp, Artificial Sequence
  Description of Artificial Sequence: Synthetic probe
tttaactgcgtccacccgcacctac

SEQ ID NO: 6 - DNA, 19 bp, Artificial Sequence
  Description of Artificial Sequence: Synthetic primer
tagacacgagcgaggtcac

SEQ ID NO: 7 - DNA, 21 bp, Artificial Sequence
  Description of Artificial Sequence: Synthetic primer
tgcacagcctgaattttgcac

SEQ ID NO: 8 - DNA, 24 bp, Artificial Sequence
  Description of Artificial Sequence: Synthetic primer
  Description of Combined DNA/RNA Molecule: Synthetic primer
cgcgaggttgagggttgtgaaggt

SEQ ID NO: 9 - DNA, 43 bp, Artificial Sequence
  Description of Artificial Sequence: Synthetic primer
  Description of Combined DNA/RNA Molecule: Synthetic primer
ggtgtcgtgggtctacgaaatatcgcaatattacctcccccgt

SEQ ID NO: 10 - DNA, 45 bp, Artificial Sequence
  Description of Artificial Sequence: Synthetic oligonucleotide
  Description of Combined DNA/RNA Molecule: Synthetic oligonucleotide
ttcagagcacctgcgtaccgaggttgagggttgtgaaagcggtaa

SEQ ID NO: 11 - DNA, 41 bp, Artificial Sequence
  Description of Artificial Sequence: Synthetic oligonucleotide
ggtgggtacgtacggcgtgtcgggttcttcggctggctcaa

SEQ ID NO: 12 - DNA, 25 bp, Artificial Sequence
  Description of Artificial Sequence: Synthetic probe
ccttgtgaaagcggtgggtacgtac

SEQ ID NO: 13 - DNA, 19 bp, Artificial Sequence
  Description of Artificial Sequence: Synthetic primer
ttcagagcacctgcgtacc

SEQ ID NO: 14 - DNA, 19 bp, Artificial Sequence
  Description of Artificial Sequence: Synthetic primer
ttgagccagccgaagaacc

SEQ ID NO: 15 - DNA, 29 bp, Artificial Sequence
  Description of Artificial Sequence: Synthetic primer
  Description of Combined DNA/RNA Molecule: Synthetic primer
gaaaaaaccgaaaccgaactaaccgccgt

SEQ ID NO: 16 - DNA, 43 bp, Artificial Sequence
  Description of Artificial Sequence: Synthetic primer
  Description of Combined DNA/RNA Molecule: Synthetic primer
ggtgtcgtggtttttatatcggtatttggtattcgtgcgaggg

SEQ ID NO: 17 - DNA, 41 bp, Artificial Sequence
  Description of Artificial Sequence: Synthetic oligonucleotide
  Description of Combined DNA/RNA Molecule: Synthetic oligonucleotide
ttcgtccctgcacgctaaccgaactaaccgccgtccgcgta

SEQ ID NO: 18 - DNA, 40 bp, Artificial Sequence
  Description of Artificial Sequence: Synthetic oligonucleotide
gcgcgcactcaccaaacccggttccatcaccgttaggcca

SEQ ID NO: 19 - DNA, 15 bp, Artificial Sequence
  Description of Artificial Sequence: Synthetic probe
ttccgtccgcgcgca

SEQ ID NO: 20 - DNA, 19 bp, Artificial Sequence
  Description of Artificial Sequence: Synthetic primer
ttcgtccctgcacgctaac

SEQ ID NO: 21 - DNA, 20 bp, Artificial Sequence
  Description of Artificial Sequence: Synthetic primer
tggcctaacggtgatggaac

SEQ ID NO: 22 - DNA, 22 bp, Artificial Sequence
  Description of Artificial Sequence: Synthetic probe
ccaccacccacacacactcacc

SEQ ID NO: 23 - DNA, 33 bp, Artificial Sequence
  Description of Artificial Sequence: Synthetic primer
  Description of Combined DNA/RNA Molecule: Synthetic primer
gttaaaaaaactattccgaaacctaaccacgtt

SEQ ID NO: 24 - DNA, 39 bp, Artificial Sequence
  Description of Artificial Sequence: Synthetic primer
  Description of Combined DNA/RNA Molecule: Synthetic primer
ggtgtcgtggaggtgggcgcgtttaattttattcggttc

SEQ ID NO: 25 - DNA, 46 bp, Artificial Sequence
  Description of Artificial Sequence: Synthetic oligonucleotide
  Description of Combined DNA/RNA Molecule: Synthetic oligonucleotide
ttcagcagcctggcatcacgaaacctaaccacgtcccagccgatcc

SEQ ID NO: 26 - DNA, 58 bp, Artificial Sequence
  Description of Artificial Sequence: Synthetic oligonucleotide
gatttcaacttcctacaactcaaaaaaaaaatccccaccgtggagcgctaaggttgca

SEQ ID NO: 27 - DNA, 30 bp, Artificial Sequence
  Description of Artificial Sequence: Synthetic probe
ttcgtcccagccgatttcaacttcctacaa

SEQ ID NO: 28 - DNA, 19 bp, Artificial Sequence
  Description of Artificial Sequence: Synthetic primer
ttcagcagcctggcatcac

SEQ ID NO: 29 - DNA, 19 bp, Artificial Sequence
  Description of Artificial Sequence: Synthetic primer
tgcaaccttagcgctccac

SEQ ID NO: 30 - DNA, 26 bp, Artificial Sequence
  Description of Artificial Sequence: Synthetic primer
  Description of Combined DNA/RNA Molecule: Synthetic primer
gactcgtaacgatcgcaaccgccgct

SEQ ID NO: 31 - DNA, 34 bp, Artificial Sequence
  Description of Artificial Sequence: Synthetic primer
  Description of Combined DNA/RNA Molecule: Synthetic primer
ggtgtcgtggcggttacgcggagttcgtcgtaga

SEQ ID NO: 32 - DNA, 42 bp, Artificial Sequence
  Description of Artificial Sequence: Synthetic oligonucleotide
  Description of Combined DNA/RNA Molecule: Synthetic oligonucleotide
tcacagagacttgccgatcacgatcgcaaccgccaccgccgt

SEQ ID NO: 33 - DNA, 48 bp, Artificial Sequence
  Description of Artificial Sequence: Synthetic oligonucleotide
gccacaaccgccttaaaacgaaacccgtgtgtagcttagacatggcca

SEQ ID NO: 34 - DNA, 18 bp, Artificial Sequence
  Description of Artificial Sequence: Synthetic probe
ttcgccaccgccacaacc

SEQ ID NO: 35 - DNA, 21 bp, Artificial Sequence
  Description of Artificial Sequence: Synthetic primer
tcacagagacttgccgatcac

SEQ ID NO: 36 - DNA, 22 bp, Artificial Sequence
  Description of Artificial Sequence: Synthetic primer
tggccatgtctaagctacacac

SEQ ID NO: 37 - DNA, 30 bp, Artificial Sequence
  Description of Artificial Sequence: Synthetic primer
  Description of Combined DNA/RNA Molecule: Synthetic primer
gcgaaagagttcggttgttatttcguagtt

SEQ ID NO: 38 - DNA, 38 bp, Artificial Sequence
  Description of Artificial Sequence: Synthetic primer
  Description of Combined DNA/RNA Molecule: Synthetic primer
ggtgtcgtggcaatatcctaactacgaccgcgcgaaat

SEQ ID NO: 39 - DNA, 56 bp, Artificial Sequence
  Description of Artificial Sequence: Synthetic oligonucleotide
  Description of Combined DNA/RNA Molecule: Synthetic oligonucleotide
tccaaacgattaggagcgtcaacgaaagagttcggttgttatttcgtaatcgttta

SEQ ID NO: 40 - DNA, 45 bp, Artificial Sequence
  Description of Artificial Sequence: Synthetic oligonucleotide
gttcgcgcggaaggtttcgtcgttttggacagaggtatacgccca

SEQ ID NO: 41 - DNA, 24 bp, Artificial Sequence
  Description of Artificial Sequence: Synthetic probe
aaatttcgtaatcgttcgcgcgga

SEQ ID NO: 42 - DNA, 22 bp, Artificial Sequence
  Description of Artificial Sequence: Synthetic primer
tccaaacgattaggagcgtcaa

SEQ ID NO: 43 - DNA, 21 bp, Artificial Sequence
  Description of Artificial Sequence: Synthetic primer
tgggcgtatacctctgtccaa

SEQ ID NO: 44 - DNA, 26 bp, Artificial Sequence
  Description of Artificial Sequence: Synthetic primer
  Description of Combined DNA/RNA Molecule: Synthetic primer
ccccgaaaaaacccaaaccaccgcgg

SEQ ID NO: 45 - DNA, 36 bp, Artificial Sequence
  Description of Artificial Sequence: Synthetic primer
  Description of Combined DNA/RNA Molecule: Synthetic primer
ggtgtcgtggggtttcgggttcgagttaggagtttg

SEQ ID NO: 46 - DNA, 45 bp, Artificial Sequence
  Description of Artificial Sequence: Synthetic oligonucleotide
  Description of Combined DNA/RNA Molecule: Synthetic oligonucleotide
tagcagctgaacaacccaacaaaacccaaaccaccgcaacgaagg

SEQ ID NO: 47 - DNA, 47 bp, Artificial Sequence
  Description of Artificial Sequence: Synthetic oligonucleotide
gaaaaccccaaacccgcgacaaaacttgttgtatggtcggcatgcta

SEQ ID NO: 48 - DNA, 24 bp, Artificial Sequence
  Description of Artificial Sequence: Synthetic probe
ttccgcaacgaaaaccccaaaccc

SEQ ID NO: 49 - DNA, 20 bp, Artificial Sequence
  Description of Artificial Sequence: Synthetic primer
tagcagctgaacaacccaac

SEQ ID NO: 50 - DNA, 20 bp, Artificial Sequence
  Description of Artificial Sequence: Synthetic primer
tagcatgccgaccatacaac

SEQ ID NO: 51 - DNA, 28 bp, Artificial Sequence
  Description of Artificial Sequence: Synthetic primer
  Description of Combined DNA/RNA Molecule: Synthetic primer
cgacgccaaaaccaaaaaactacccgat

SEQ ID NO: 52 - DNA, 46 bp, Artificial Sequence
  Description of Artificial Sequence: Synthetic primer
  Description of Combined DNA/RNA Molecule: Synthetic primer
ggtgtcgtgggagatagttttggaaagttttgggtaaagtcggtac

SEQ ID NO: 53 - DNA, 52 bp, Artificial Sequence
  Description of Artificial Sequence: Synthetic oligonucleotide
  Description of Combined DNA/RNA Molecule: Synthetic oligonucleotide
tcttacgcccagggaatgtaaccgccaaaaccaaaaaactacccaacgccat

SEQ ID NO: 54 - DNA, 54 bp, Artificial Sequence
  Description of Artificial Sequence: Synthetic oligonucleotide
gccgctcgcgaactaattcctcaaactataaaacgttgtccggctgtggttaca

SEQ ID NO: 55 - DNA, 19 bp, Artificial Sequence
  Description of Artificial Sequence: Synthetic probe
tgtacccaacgccgctcgc

SEQ ID NO: 56 - DNA, 22 bp, Artificial Sequence
  Description of Artificial Sequence: Synthetic primer
tcttacgcccagggaatgtaac

SEQ ID NO: 57 - DNA, 20 bp, Artificial Sequence
  Description of Artificial Sequence: Synthetic primer
tgtaaccacagccggacaac

SEQ ID NO: 58 - DNA, 37 bp, Artificial Sequence
  Description of Artificial Sequence: Synthetic primer
  Description of Combined DNA/RNA Molecule: Synthetic primer
cgcgaaactaaaaactataaaaacgataaacacgcat

SEQ ID NO: 59 - DNA, 35 bp, Artificial Sequence
  Description of Artificial Sequence: Synthetic primer
  Description of Combined DNA/RNA Molecule: Synthetic primer
ggtgtcgtggtgcggggtgtcgtagtgttautttc

SEQ ID NO: 60 - DNA, 57 bp, Artificial Sequence
  Description of Artificial Sequence: Synthetic oligonucleotide
  Description of Combined DNA/RNA Molecule: Synthetic oligonucleotide
tttcgctcgacgcataccaaaactaaaaactataaaaacgataaacacgtacgacac

SEQ ID NO: 61 - DNA, 45 bp, Artificial Sequence
  Description of Artificial Sequence: Synthetic oligonucleotide
gacgtaccgaaaccgcctaacttcgctggcgcggctactgtaaaa

SEQ ID NO: 62 - DNA, 25 bp, Artificial Sequence
  Description of Artificial Sequence: Synthetic probe
ccaacacgtacgacgtaccgaaacc

SEQ ID NO: 63 - DNA, 19 bp, Artificial Sequence
  Description of Artificial Sequence: Synthetic primer
tttcgctcgacgcatacca

SEQ ID NO: 64 - DNA, 19 bp, Artificial Sequence
  Description of Artificial Sequence: Synthetic primer
ttttacagtagccgcgcca

SEQ ID NO: 65 - DNA, 28 bp, Artificial Sequence
  Description of Artificial Sequence: Synthetic primer
  Description of Combined DNA/RNA Molecule: Synthetic primer
tcctccgacgactaactctacacuacag

SEQ ID NO: 66 - DNA, 32 bp, Artificial Sequence
  Description of Artificial Sequence: Synthetic primer
  Description of Combined DNA/RNA Molecule: Synthetic primer
ctccgacgactaactctacactacaaaaacgt

SEQ ID NO: 67 - DNA, 32 bp, Artificial Sequence
  Description of Artificial Sequence: Synthetic primer
  Description of Combined DNA/RNA Molecule: Synthetic primer
ggtgtcgtgaggtagcggcgaggaagcgtttc

SEQ ID NO: 68 - DNA, 55 bp, Artificial Sequence
  Description of Artificial Sequence: Synthetic oligonucleotide
  Description of Combined DNA/RNA Molecule: Synthetic oligonucleotide
taggaacacggaggacatcaacgacgactaactctacactacaaaaatgcgaata

SEQ ID NO: 69 - DNA, 43 bp, Artificial Sequence
  Description of Artificial Sequence: Synthetic oligonucleotide
gaacgcgacgccccaaccaacttgtgggtgggtataggtcaga

SEQ ID NO: 70 - DNA, 22 bp, Artificial Sequence
  Description of Artificial Sequence: Synthetic probe
ttaaaatgcgaacgcgacgccc

SEQ ID NO: 71 - DNA, 21 bp, Artificial Sequence
  Description of Artificial Sequence: Synthetic primer
taggaacacggaggacatcaa

SEQ ID NO: 72 - DNA, 22 bp, Artificial Sequence
  Description of Artificial Sequence: Synthetic primer
tctgacctatacccacccacaa

SEQ ID NO: 73 - DNA, 26 bp, Artificial Sequence
  Description of Artificial Sequence: Synthetic primer
  Description of Combined DNA/RNA Molecule: Synthetic primer
cgagtcggtcgagttttagtcggagc

SEQ ID NO: 74 - DNA, 40 bp, Artificial Sequence
  Description of Artificial Sequence: Synthetic primer
  Description of Combined DNA/RNA Molecule: Synthetic primer
ggtgtcgtggcccgaaaacgaaacgtaaaaactacgactg

SEQ ID NO: 75 - DNA, 55 bp, Artificial Sequence
  Description of Artificial Sequence: Synthetic oligonucleotide
  Description of Combined DNA/RNA Molecule: Synthetic oligonucleotide
tctcataccagacgcggtaactcgagttttagtcggagttacgtgatcacgttcg

SEQ ID NO: 76 - DNA, 55 bp, Artificial Sequence
  Description of Artificial Sequence: Synthetic oligonucleotide
gtttattcgtatttatagtttgggtagcgcgttgcggttcgtgtcgctgtgctta

SEQ ID NO: 77 - DNA, 38 bp, Artificial Sequence
  Description of Artificial Sequence: Synthetic probe
aatgatcacgtttattcgtatttatagtttgggtagcg

SEQ ID NO: 78 - DNA, 21 bp, Artificial Sequence
  Description of Artificial Sequence: Synthetic primer
tctcataccagacgcggtaac

SEQ ID NO: 79 - DNA, 19 bp, Artificial Sequence
  Description of Artificial Sequence: Synthetic primer
taagcacagcgacacgaac

SEQ ID NO: 80 - DNA, 57 bp, Artificial Sequence
  Description of Artificial Sequence: Synthetic primer
  Description of Combined DNA/RNA Molecule: Synthetic primer
taagcacagcgacacgaaccgaaacgtaaaaactacgactaatactaaaatgcaaca

SEQ ID NO: 81 - DNA, 29 bp, Artificial Sequence
  Description of Artificial Sequence: Synthetic primer
  Description of Combined DNA/RNA Molecule: Synthetic primer
attttttttttatcgcgcgatttcgtttc

SEQ ID NO: 82 - DNA, 40 bp, Artificial Sequence
  Description of Artificial Sequence: Synthetic primer
  Description of Combined DNA/RNA Molecule: Synthetic primer
ggtgtcgtggcctactccgaaacctaaaactaaacataac

SEQ ID NO: 83 - DNA, 67 bp, Artificial Sequence
  Description of Artificial Sequence: Synthetic oligonucleotide
  Description of Combined DNA/RNA Molecule: Synthetic oligonucleotide
tctgcccttcgcttcgaactttttttagtattttagggtgagtttagtttagattattactcggaag

SEQ ID NO: 84 - DNA, 62 bp, Artificial Sequence
  Description of Artificial Sequence: Synthetic oligonucleotide
ggaaagtttttaaaagttttagtttagcgttgaagtaacggggttgtatggtcggcatgcta

SEQ ID NO: 85 - DNA, 42 bp, Artificial Sequence
  Description of Artificial Sequence: Synthetic probe
ccattactcggaaagtttttaaaagttttagtttagcgttga

SEQ ID NO: 86 - DNA, 19 bp, Artificial Sequence
  Description of Artificial Sequence: Synthetic primer
tctgcccttcgcttcgaac

SEQ ID NO: 87 - DNA, 20 bp, Artificial Sequence
  Description of Artificial Sequence: Synthetic primer
tagcatgccgaccatacaac

SEQ ID NO: 88 - DNA, 53 bp, Artificial Sequence
  Description of Artificial Sequence: Synthetic primer
  Description of Combined DNA/RNA Molecule: Synthetic primer
tagcatgccgaccatacaacccgaaacctaaaactaaacataatcctgutacc

SEQ ID NO: 89 - DNA, 24 bp, Artificial Sequence
  Description of Artificial Sequence: Synthetic primer
  Description of Combined DNA/RNA Molecule: Synthetic primer
ggttgagggttgtgaaggcggtga

SEQ ID NO: 90 - DNA, 41 bp, Artificial Sequence
  Description of Artificial Sequence: Synthetic primer
  Description of Combined DNA/RNA Molecule: Synthetic primer
ggtgtcgtggcgtctacgaaatatcgcaatattaccuccct

SEQ ID NO: 91 - DNA, 48 bp, Artificial Sequence
  Description of Artificial Sequence: Synthetic oligonucleotide
  Description of Combined DNA/RNA Molecule: Synthetic oligonucleotide
tccaaacaagctgatccgtacaggttgtgaaggcggtgggcacgtata

SEQ ID NO: 92 - DNA, 43 bp, Artificial Sequence
  Description of Artificial Sequence: Synthetic oligonucleotide
gtacggcgtgtcggagtcgtttggtgtgtcggagcggttacta

SEQ ID NO: 93 - DNA, 20 bp, Artificial Sequence
  Description of Artificial Sequence: Synthetic probe
aatgggcacgtacggcgtgt

SEQ ID NO: 94 - DNA, 22 bp, Artificial Sequence
  Description of Artificial Sequence: Synthetic primer
tccaaacaagctgatccgtaca

SEQ ID NO: 95 - DNA, 19 bp, Artificial Sequence
  Description of Artificial Sequence: Synthetic primer
tagtaaccgctccgacaca

SEQ ID NO: 96 - DNA, 41 bp, Artificial Sequence
  Description of Artificial Sequence: Synthetic primer
  Description of Combined DNA/RNA Molecule: Synthetic primer
tagtaaccgctccgacacacgccgcgaaaccaaatgaccct

SEQ ID NO: 97 - DNA, 24 bp, Artificial Sequence
  Description of Artificial Sequence: Synthetic primer
  Description of Combined DNA/RNA Molecule: Synthetic primer
ggttgagggttgtgaaggcggtga

SEQ ID NO: 98 - DNA, 39 bp, Artificial Sequence
  Description of Artificial Sequence: Synthetic primer
  Description of Combined DNA/RNA Molecule: Synthetic primer
ggtgtcgtggctaacaacgtctacgaaatatcgcaatac

SEQ ID NO: 99 - DNA, 47 bp, Artificial Sequence
  Description of Artificial Sequence: Synthetic oligonucleotide
  Description of Combined DNA/RNA Molecule: Synthetic oligonucleotide
tccaaacaagctgatccgtacatgaaggcggtgggtacgcacggcac

SEQ ID NO: 100 - DNA, 44 bp, Artificial Sequence
  Description of Artificial Sequence: Synthetic oligonucleotide
ggcgtgtcggagtcgtttggtttcgtgtgtcggagcggttacta

SEQ ID NO: 101 - DNA, 21 bp, Artificial Sequence
  Description of Artificial Sequence: Synthetic probe
aatacgcacggcgtgtcggag

SEQ ID NO: 102 - DNA, 22 bp, Artificial Sequence
  Description of Artificial Sequence: Synthetic primer
tccaaacaagctgatccgtaca

SEQ ID NO: 103 - DNA, 19 bp, Artificial Sequence
  Description of Artificial Sequence: Synthetic primer
tagtaaccgctccgacaca

SEQ ID NO: 104 - DNA, 41 bp, Artificial Sequence; identical to SEQ ID NO: 96
  Description of Artificial Sequence: Synthetic primer
  Description of Combined DNA/RNA Molecule: Synthetic primer

SEQ ID NO: 105 - DNA, 24 bp, Artificial Sequence
  Description of Artificial Sequence: Synthetic primer
  Description of Combined DNA/RNA Molecule: Synthetic primer
gttagagacgtgaggtcgcgaggc

SEQ ID NO: 106 - DNA, 41 bp, Artificial Sequence
  Description of Artificial Sequence: Synthetic primer
  Description of Combined DNA/RNA Molecule: Synthetic primer
ggtgtcgtggctacgaaatatcgcaatattacctcccccgt

SEQ ID NO: 107 - DNA, 48 bp, Artificial Sequence
  Description of Artificial Sequence: Synthetic oligonucleotide
  Description of Combined DNA/RNA Molecule: Synthetic oligonucleotide
tccaaacaagctgatccgtacagaggttgagggttgtgaaagcggtaa

SEQ ID NO: 108 - DNA, 41 bp, Artificial Sequence
  Description of Artificial Sequence: Synthetic oligonucleotide
ggtgggtacgtacggcgtgtcgtgtgtcggagcggttacta

SEQ ID NO: 109 - DNA, 24 bp, Artificial Sequence
  Description of Artificial Sequence: Synthetic probe
aatgaaagcggtgggtacgtacgg

SEQ ID NO: 110 - DNA, 22 bp, Artificial Sequence
  Description of Artificial Sequence: Synthetic primer
tccaaacaagctgatccgtaca

SEQ ID NO: 111 - DNA, 19 bp, Artificial Sequence
  Description of Artificial Sequence: Synthetic primer
tagtaaccgctccgacaca

SEQ ID NO: 112 - DNA, 41 bp, Artificial Sequence; identical to SEQ ID NO: 96
  Description of Artificial Sequence: Synthetic primer
  Description of Combined DNA/RNA Molecule: Synthetic primer

SEQ ID NO: 113 - DNA, 24 bp, Artificial Sequence
  Description of Artificial Sequence: Synthetic primer
  Description of Combined DNA/RNA Molecule: Synthetic primer
agtcggagtcgagttggtcgtcgc

SEQ ID NO: 114 - DNA, 39 bp, Artificial Sequence
  Description of Artificial Sequence: Synthetic primer
  Description of Combined DNA/RNA Molecule: Synthetic primer
ggtgtcgtggaaaaatttccacaccgacatctaauactt

SEQ ID NO: 115 - DNA, 46 bp, Artificial Sequence
  Description of Artificial Sequence: Synthetic oligonucleotide
  Description of Combined DNA/RNA Molecule: Synthetic oligonucleotide
tctgccagaacaccgacacggagtcgagttggtcgtcgctcgcgta

SEQ ID NO: 116 - DNA, 58 bp, Artificial Sequence
  Description of Artificial Sequence: Synthetic oligonucleotide
gcgcgtatttattaagttcgttgagttttttttcgtacggtgtgttggcgtacggtga

SEQ ID NO: 117 - DNA, 30 bp, Artificial Sequence
  Description of Artificial Sequence: Synthetic probe
aagtcgctcgcgcgtatttattaagttcgt

SEQ ID NO: 118 - DNA, 19 bp, Artificial Sequence
  Description of Artificial Sequence: Synthetic primer
tctgccagaacaccgacac

SEQ ID NO: 119 - DNA, 19 bp, Artificial Sequence
  Description of Artificial Sequence: Synthetic primer
tcaccgtacgccaacacac

SEQ ID NO: 120 - DNA, 49 bp, Artificial Sequence
  Description of Artificial Sequence: Synthetic primer
  Description of Combined DNA/RNA Molecule: Synthetic primer
tcaccgtacgccaacacaccacaccgacatctaatactcgtatgaaaag

SEQ ID NO: 121 - DNA, 26 bp, Artificial Sequence
  Description of Artificial Sequence: Synthetic primer
  Description of Combined DNA/RNA Molecule: Synthetic primer
gggtttttattcgagagcgtcgggac

SEQ ID NO: 122 - DNA, 37 bp, Artificial Sequence
  Description of Artificial Sequence: Synthetic primer
  Description of Combined DNA/RNA Molecule: Synthetic primer
ggtgtcgtggcccaaaacgaaacctaaactccuaaag

SEQ ID NO: 123 - DNA, 47 bp, Artificial Sequence
  Description of Artificial Sequence: Synthetic oligonucleotide
  Description of Combined DNA/RNA Molecule: Synthetic oligonucleotide
ttcgtgggcacacaagcaacgagagcgtcgggattttgtctcgcgcc

SEQ ID NO: 124 - DNA, 53 bp, Artificial Sequence
  Description of Artificial Sequence: Synthetic oligonucleotide
gcgttgttttttaagtcggatggagttgagcttgcttggcttgatctacctga

SEQ ID NO: 125 - DNA, 31 bp, Artificial Sequence
  Description of Artificial Sequence: Synthetic probe
aattgtctcgcgttgttttttaagtcggatg

SEQ ID NO: 126 - DNA, 19 bp, Artificial Sequence
  Description of Artificial Sequence: Synthetic primer
ttcgtgggcacacaagcaa

SEQ ID NO: 127 - DNA, 22 bp, Artificial Sequence
  Description of Artificial Sequence: Synthetic primer
tcaggtagatcaagccaagcaa

SEQ ID NO: 128 - DNA, 57 bp, Artificial Sequence
  Description of Artificial Sequence: Synthetic primer
  Description of Combined DNA/RNA Molecule: Synthetic primer
tcaggtagatcaagccaagcaaacctaaactcctaaaactaaaataaacgtgctcag

SEQ ID NO: 129 - DNA, 22 bp, Artificial Sequence
  Description of Artificial Sequence: Synthetic primer
  Description of Combined DNA/RNA Molecule: Synthetic primer
gcgcgcgtttcgttttcgggaa

SEQ ID NO: 130 - DNA, 39 bp, Artificial Sequence
  Description of Artificial Sequence: Synthetic primer
  Description of Combined DNA/RNA Molecule: Synthetic primer
ggtgtcgtggcgccgaaatacaacataaaaactcuttca

SEQ ID NO: 131 - DNA, 48 bp, Artificial Sequence
  Description of Artificial Sequence: Synthetic oligonucleotide
  Description of Combined DNA/RNA Molecule: Synthetic oligonucleotide
tttcaggccctaaccaccacgcgtttcgttttcggaggtaatcgtcaa

SEQ ID NO: 132 - DNA, 60 bp, Artificial Sequence
  Description of Artificial Sequence: Synthetic oligonucleotide
gtcgggtttgtattttttgtagtttttaaggtttttcggtgtgggattaagggcgatgga

SEQ ID NO: 133 - DNA, 40 bp, Artificial Sequence
  Description of Artificial Sequence: Synthetic probe
aaggtaatcgtcgggtttgtattttttgtagtttttaagg

SEQ ID NO: 134 - DNA, 20 bp, Artificial Sequence
  Description of Artificial Sequence: Synthetic primer
tttcaggccctaaccaccac

SEQ ID NO: 135 - DNA, 20 bp, Artificial Sequence
  Description of Artificial Sequence: Synthetic primer
tccatcgcccttaatcccac

SEQ ID NO: 136 - DNA, 53 bp, Artificial Sequence
  Description of Artificial Sequence: Synthetic primer
  Description of Combined DNA/RNA Molecule: Synthetic primer
tccatcgcccttaatcccaccaacataaaaactctttcgctaacactgaaaag

SEQ ID NO: 137 - DNA, 26 bp, Artificial Sequence
  Description of Artificial Sequence: Synthetic primer
  Description of Combined DNA/RNA Molecule: Synthetic primer
ggttgcgtttttttaggaggcggtga

SEQ ID NO: 138 - DNA, 31 bp, Artificial Sequence
  Description of Artificial Sequence: Synthetic primer
  Description of Combined DNA/RNA Molecule: Synthetic primer
ggtgtcgtggaccccgaccgctatccaacca

SEQ ID NO: 139 - DNA, 40 bp, Artificial Sequence
  Description of Artificial Sequence: Synthetic oligonucleotide
  Description of Combined DNA/RNA Molecule: Synthetic oligonucleotide
tcactatcggcgtagtcaccagaggcggtggcagcggcac

SEQ ID NO: 140 - DNA, 37 bp, Artificial Sequence
  Description of Artificial Sequence: Synthetic oligonucleotide
ggcgtaggacgcgcgggtggtgactttacccggagga

SEQ ID NO: 141 - DNA, 20 bp, Artificial Sequence
  Description of Artificial Sequence: Synthetic probe
aatggcagcggcgtaggacg

SEQ ID NO: 142 - DNA, 21 bp, Artificial Sequence
  Description of Artificial Sequence: Synthetic primer
tcactatcggcgtagtcacca

SEQ ID NO: 143 - DNA, 20 bp, Artificial Sequence
  Description of Artificial Sequence: Synthetic primer
tcctccgggtaaagtcacca

SEQ ID NO: 144 - DNA, 42 bp, Artificial Sequence
  Description of Artificial Sequence: Synthetic primer
  Description of Combined DNA/RNA Molecule: Synthetic primer
tcctccgggtaaagtcaccaaaccgctccgtaccctgcgcgc

SEQ ID NO: 145 - DNA, 30 bp, Artificial Sequence
  Description of Artificial Sequence: Synthetic primer
  Description of Combined DNA/RNA Molecule: Synthetic primer
ttttttgtagaaggattttgcgttcgggag

SEQ ID NO: 146 - DNA, 30 bp, Artificial Sequence
  Description of Artificial Sequence: Synthetic primer
  Description of Combined DNA/RNA Molecule: Synthetic primer
ggtgtcgtggccgaacgccccgctacgact

SEQ ID NO: 147 - DNA, 56 bp, Artificial Sequence
  Description of Artificial Sequence: Synthetic oligonucleotide
  Description of Combined DNA/RNA Molecule: Synthetic oligonucleotide
tagcgatagtaccgacagtcacgggaggaatttttttttttttgggcgctcgttcc

SEQ ID NO: 148 - DNA, 66 bp, Artificial Sequence
  Description of Artificial Sequence: Synthetic oligonucleotide
gtttttttcgttatggttcggtttttatattcgtttatatttggtcgtgcggaaacctatcgtcga

SEQ ID NO: 149 - DNA, 29 bp, Artificial Sequence
  Description of Artificial Sequence: Synthetic probe
aaggcgctcgtttttttcgttatggttcg

SEQ ID NO: 150 - DNA, 22 bp, Artificial Sequence
  Description of Artificial Sequence: Synthetic primer
tagcgatagtaccgacagtcac

SEQ ID NO: 151 - DNA, 20 bp, Artificial Sequence
  Description of Artificial Sequence: Synthetic primer
tcgacgataggtttccgcac

SEQ ID NO: 152 - DNA, 49 bp, Artificial Sequence
  Description of Artificial Sequence: Synthetic primer
  Description of Combined DNA/RNA Molecule: Synthetic primer
tcgacgataggtttccgcacccccgctacgaccaaatataaatgaatac

SEQ ID NO: 153 - DNA, 20 bp, Artificial Sequence
  Description of Artificial Sequence: Synthetic primer
  Description of Combined DNA/RNA Molecule: Synthetic primer
ggtgcgagcgtcgttgggac

SEQ ID NO: 154 - DNA, 29 bp, Artificial Sequence
  Description of Artificial Sequence: Synthetic primer
  Description of Combined DNA/RNA Molecule: Synthetic primer
ggtgtcgtgggcctacccacccgcutcgt

SEQ ID NO: 155 - DNA, 53 bp, Artificial Sequence
  Description of Artificial Sequence: Synthetic oligonucleotide
  Description of Combined DNA/RNA Molecule: Synthetic oligonucleotide
ttgattgggatcgttcgcacgggtagttggcgttttggtttttatctcgtgaa

SEQ ID NO: 156 - DNA, 54 bp, Artificial Sequence
  Description of Artificial Sequence: Synthetic oligonucleotide
gtgggaaaatggttttgagttcgattggtttgaggtggctcaataacgggcaga

SEQ ID NO: 157 - DNA, 33 bp, Artificial Sequence
  Description of Artificial Sequence: Synthetic probe
aattatctcgtgggaaaatggttttgagttcga

SEQ ID NO: 158 - DNA, 20 bp, Artificial Sequence
  Description of Artificial Sequence: Synthetic primer
ttgattgggatcgttcgcac

SEQ ID NO: 159 - DNA, 20 bp, Artificial Sequence
  Description of Artificial Sequence: Synthetic primer
tctgcccgttattgagccac

SEQ ID NO: 160 - DNA, 40 bp, Artificial Sequence
  Description of Artificial Sequence: Synthetic primer
  Description of Combined DNA/RNA Molecule: Synthetic primer
tctgcccgttattgagccaccccacccgcttcgtgaaatt

SEQ ID NO: 161 - DNA, 31 bp, Artificial Sequence
  Description of Artificial Sequence: Synthetic primer
  Description of Combined DNA/RNA Molecule: Synthetic primer
ttttgggaaagatgggtttttttttautttc

SEQ ID NO: 162 - DNA, 34 bp, Artificial Sequence
  Description of Artificial Sequence: Synthetic primer
  Description of Combined DNA/RNA Molecule: Synthetic primer
ggtgtcgtggtacaaacccgcgaatacgcgccgt

SEQ ID NO: 163 - DNA, 69 bp, Artificial Sequence
  Description of Artificial Sequence: Synthetic oligonucleotide
  Description of Combined DNA/RNA Molecule: Synthetic oligonucleotide
tgtgcactagtccacgtgaaacggtttttttttatttttattattagtttttggtatatggaacgcgcc

SEQ ID NO: 164 - DNA, 43 bp, Artificial Sequence
  Description of Artificial Sequence: Synthetic oligonucleotide
gcgttgagtggtggttgcggggtttccgcgatctttgcattca

SEQ ID NO: 165 - DNA, 24 bp, Artificial Sequence
  Description of Artificial Sequence: Synthetic probe
ccatggaacgcgttgagtggtggt

SEQ ID NO: 166 - DNA, 22 bp, Artificial Sequence
  Description of Artificial Sequence: Synthetic primer
tgtgcactagtccacgtgaaac

SEQ ID NO: 167 - DNA, 22 bp, Artificial Sequence
  Description of Artificial Sequence: Synthetic primer
tgaatgcaaagatcgcggaaac

SEQ ID NO: 168 - DNA, 51 bp, Artificial Sequence
  Description of Artificial Sequence: Synthetic primer
  Description of Combined DNA/RNA Molecule: Synthetic primer
tgaatgcaaagatcgcggaaacccgcttatcactcattcattcctgcaact

SEQ ID NO: 169 - DNA, 20 bp, Artificial Sequence
  Description of Artificial Sequence: Synthetic primer
  Description of Combined DNA/RNA Molecule: Synthetic primer
cggtagggtacggcggtggt

SEQ ID NO: 170 - DNA, 35 bp, Artificial Sequence
  Description of Artificial Sequence: Synthetic primer
  Description of Combined DNA/RNA Molecule: Synthetic primer
ggtgtcgtggactacgaaacctcaacgacccgaat

SEQ ID NO: 171 - DNA, 42 bp, Artificial Sequence
  Description of Artificial Sequence: Synthetic oligonucleotide
  Description of Combined DNA/RNA Molecule: Synthetic oligonucleotide
tcctagtacctacagtgggcaacggtggcggtggatcggcag

SEQ ID NO: 172 - DNA, 42 bp, Artificial Sequence
  Description of Artificial Sequence: Synthetic oligonucleotide
ggcgatcggcgggtcgaagattgaccgctgttatacgttgca

SEQ ID NO: 173 - DNA, 21 bp, Artificial Sequence
  Description of Artificial Sequence: Synthetic probe
aagtggatcggcgatcggcgg

SEQ ID NO: 174 - DNA, 22 bp, Artificial Sequence
  Description of Artificial Sequence: Synthetic primer
tcctagtacctacagtgggcaa

SEQ ID NO: 175 - DNA, 22 bp, Artificial Sequence
  Description of Artificial Sequence: Synthetic primer
tgcaacgtataacagcggtcaa

SEQ ID NO: 176 - DNA, 49 bp, Artificial Sequence
  Description of Artificial Sequence: Synthetic primer
  Description of Combined DNA/RNA Molecule: Synthetic primer
tgcaacgtataacagcggtcaacgacccgaacttccaatctttgaccca

SEQ ID NO: 177 - DNA, 24 bp, Artificial Sequence
  Description of Artificial Sequence: Synthetic primer
  Description of Combined DNA/RNA Molecule: Synthetic primer
ggtcgtttttggaagtggcgggat

SEQ ID NO: 178 - DNA, 32 bp, Artificial Sequence
  Description of Artificial Sequence: Synthetic primer
  Description of Combined DNA/RNA Molecule: Synthetic primer
ggtgtcgtggcgcccgtactaaccgacuccac

SEQ ID NO: 179 - DNA, 41 bp, Artificial Sequence
  Description of Artificial Sequence: Synthetic oligonucleotide
  Description of Combined DNA/RNA Molecule: Synthetic oligonucleotide
tagacacgagcgaggtcacggcggagcgaagggttcggaaa

SEQ ID NO: 180 - DNA, 43 bp, Artificial Sequence
  Description of Artificial Sequence: Synthetic oligonucleotide
ggaggagggatcggaggagcgagtgcaaaattcaggctgtgca

SEQ ID NO: 181 - DNA, 23 bp, Artificial Sequence
  Description of Artificial Sequence: Synthetic probe
ttagggttcggaggagggatcgg

SEQ ID NO: 182 - DNA, 19 bp, Artificial Sequence
  Description of Artificial Sequence: Synthetic primer
tagacacgagcgaggtcac

SEQ ID NO: 183 - DNA, 21 bp, Artificial Sequence
  Description of Artificial Sequence: Synthetic primer
tgcacagcctgaattttgcac

SEQ ID NO: 184 - DNA, 48 bp, Artificial Sequence
  Description of Artificial Sequence: Synthetic primer
  Description of Combined DNA/RNA Molecule: Synthetic primer
tgcacagcctgaattttgcacactaaccgactccatcgctatgccgca

SEQ ID NO: 185 - DNA, 37 bp, Artificial Sequence
  Description of Artificial Sequence: Synthetic primer
  Description of Combined DNA/RNA Molecule: Synthetic primer
gtagatgttttttattaaatgttaagagtaatatttc

SEQ ID NO: 186 - DNA, 35 bp, Artificial Sequence
  Description of Artificial Sequence: Synthetic primer
  Description of Combined DNA/RNA Molecule: Synthetic primer
ggtgtcgtggcacattcctactccccaaccctttt

SEQ ID NO: 187 - DNA, 65 bp, Artificial Sequence
  Description of Artificial Sequence: Synthetic oligonucleotide
  Description of Combined DNA/RNA Molecule: Synthetic oligonucleotide
taatctccagacctccgaaccgttaagagtaatatttttttttattttttgtgagttagcggtta

SEQ ID NO: 188 - DNA, 47 bp, Artificial Sequence
  Description of Artificial Sequence: Synthetic oligonucleotide
ggtcgcgtttttgtatggaggtgcgggtgtaaggattgaacgggaca

SEQ ID NO: 189 - DNA, 28 bp, Artificial Sequence
  Description of Artificial Sequence: Synthetic probe
aaagttagcggtcgcgtttttgtatggg

SEQ ID NO: 190 - DNA, 21 bp, Artificial Sequence
  Description of Artificial Sequence: Synthetic primer
taatctccagacctccgaacc

SEQ ID NO: 191 - DNA, 22 bp, Artificial Sequence
  Description of Artificial Sequence: Synthetic primer
tgtcccgttcaatccttacacc

SEQ ID NO: 192 - DNA, 46 bp, Artificial Sequence
  Description of Artificial Sequence: Synthetic primer
  Description of Combined DNA/RNA Molecule: Synthetic primer
tgtcccgttcaatccttacacctccccaaccctttcctctgcacct

SEQ ID NO: 193 - DNA, 33 bp, Artificial Sequence
  Description of Artificial Sequence: Synthetic primer
  Description of Combined DNA/RNA Molecule: Synthetic primer
tagtttcgtggttttgttaattatagacgtatg

SEQ ID NO: 194 - DNA, 47 bp, Artificial Sequence
  Description of Artificial Sequence: Synthetic primer
  Description of Combined DNA/RNA Molecule: Synthetic primer
ggtgtcgtggttaaaatataaaataaatactacgacatcgaaaaact

SEQ ID NO: 195 - DNA, 68 bp, Artificial Sequence
  Description of Artificial Sequence: Synthetic oligonucleotide
  Description of Combined DNA/RNA Molecule: Synthetic oligonucleotide
tacgaatcacccgagagttcaatgttaattatagacgtataatagtaagtttgtaaagggcacgggag

SEQ ID NO: 196 - DNA, 58 bp, Artificial Sequence
  Description of Artificial Sequence: Synthetic oligonucleotide
ggagacgggcgtgaattattttttttattagtagggttgtgggtgggtataggtcaga

SEQ ID NO: 197 - DNA, 19 bp, Artificial Sequence
  Description of Artificial Sequence: Synthetic probe
ttagggcacggagacgggc

SEQ ID NO: 198 - DNA, 22 bp, Artificial Sequence
  Description of Artificial Sequence: Synthetic primer
tacgaatcacccgagagttcaa

SEQ ID NO: 199 - DNA, 22 bp, Artificial Sequence
  Description of Artificial Sequence: Synthetic primer
tctgacctatacccacccacaa

SEQ ID NO: 200 - DNA, 62 bp, Artificial Sequence
  Description of Artificial Sequence: Synthetic primer
  Description of Combined DNA/RNA Molecule: Synthetic primer
tctgacctatacccacccacaatcgaaaaaccctactaataaaaaaaataattcatgcccgc

SEQ ID NO: 201 - DNA, 34 bp, Artificial Sequence
  Description of Artificial Sequence: Synthetic primer
  Description of Combined DNA/RNA Molecule: Synthetic primer
tgttgtaagtaaatgatacggttattttcgaatc

SEQ ID NO: 202 - DNA, 44 bp, Artificial Sequence
  Description of Artificial Sequence: Synthetic primer
  Description of Combined DNA/RNA Molecule: Synthetic primer
ggtgtcgtggcctctaatctatttatttcctcctccttaacgtt

SEQ ID NO: 203 - DNA, 54 bp, Artificial Sequence
  Description of Artificial Sequence: Synthetic oligonucleotide
  Description of Combined DNA/RNA Molecule: Synthetic oligonucleotide
tgcttacccacgatgcacctttcgaattagttattgtgggtgcgtactcgagca

SEQ ID NO: 204 - DNA, 59 bp, Artificial Sequence
  Description of Artificial Sequence: Synthetic oligonucleotide
gagtgtggagatgttcgtgtaatatttatatggagacgtggtcgtatgacttgctcgca

SEQ ID NO: 205 - DNA, 29 bp, Artificial Sequence
  Description of Artificial Sequence: Synthetic probe
aacgtactcgagtgtggagatgttcgtgt

SEQ ID NO: 206 - DNA, 19 bp, Artificial Sequence
  Description of Artificial Sequence: Synthetic primer
tgcttacccacgatgcacc

SEQ ID NO: 207 - DNA, 20 bp, Artificial Sequence
  Description of Artificial Sequence: Synthetic primer
tgcgagcaagtcatacgacc

SEQ ID NO: 208 - DNA, 57 bp, Artificial Sequence
  Description of Artificial Sequence: Synthetic primer
  Description of Combined DNA/RNA Molecule: Synthetic primer
tgcgagcaagtcatacgacccctctaatctatttatttcctcctccttaatguctct

SEQ ID NO: 209 - DNA, 20 bp, Artificial Sequence
  Description of Artificial Sequence: Synthetic primer
  Description of Combined DNA/RNA Molecule: Synthetic primer
cggggacgggacgacgtatc

SEQ ID NO: 210 - DNA, 38 bp, Artificial Sequence
  Description of Artificial Sequence: Synthetic primer
  Description of Combined DNA/RNA Molecule: Synthetic primer
ggtgtcgtgggctactccgatacaaaaaacgaaacgca

SEQ ID NO: 211 - DNA, 51 bp, Artificial Sequence
  Description of Artificial Sequence: Synthetic oligonucleotide
  Description of Combined DNA/RNA Molecule: Synthetic oligonucleotide
tggacacttcgcccttcttaacgggacgggacgacgtatttttctcgtgcc

SEQ ID NO: 212 - DNA, 49 bp, Artificial Sequence
  Description of Artificial Sequence: Synthetic oligonucleotide
gtgtttcgttttgcgtttttttgcgcgtgtttgggatctgggcatcaca

SEQ ID NO: 213 - DNA, 33 bp, Artificial Sequence
  Description of Artificial Sequence: Synthetic probe
ccttttctcgtgtttcgttttgcgtttttttgc

SEQ ID NO: 214 - DNA, 22 bp, Artificial Sequence
  Description of Artificial Sequence: Synthetic primer
tggacacttcgcccttcttaac

SEQ ID NO: 215 - DNA, 21 bp, Artificial Sequence
  Description of Artificial Sequence: Synthetic primer
tgtgatgcccagatcccaaac

SEQ ID NO: 216 - DNA, 52 bp, Artificial Sequence
  Description of Artificial Sequence: Synthetic primer
  Description of Combined DNA/RNA Molecule: Synthetic primer
tgtgatgcccagatcccaaacgctactccgatacaaaaaacgaaatgcgcag

SEQ ID NO: 217 - DNA, 31 bp, Artificial Sequence
  Description of Artificial Sequence: Synthetic primer
  Description of Combined DNA/RNA Molecule: Synthetic primer
cgaggaagttttataaaagttttgtcgcgac

SEQ ID NO: 218 - DNA, 43 bp, Artificial Sequence
  Description of Artificial Sequence: Synthetic primer
  Description of Combined DNA/RNA Molecule: Synthetic primer
ggtgtcgtggctaaacgacaaatactatactatcgaacgaaca

SEQ ID NO: 219 - DNA, 58 bp, Artificial Sequence
  Description of Artificial Sequence: Synthetic oligonucleotide
  Description of Combined DNA/RNA Molecule: Synthetic oligonucleotide
tcaaacaaaggcgaccacaacgaggaagttttataaaagttttgtcgcgactcgttcc

SEQ ID NO: 220 - DNA, 66 bp, Artificial Sequence
  Description of Artificial Sequence: Synthetic oligonucleotide
gttttttgtattttattcgttggtttttatttttcggagacgttgttgtcgcataggcagttcata

SEQ ID NO: 221 - DNA, 39 bp, Artificial Sequence
  Description of Artificial Sequence: Synthetic probe
aagcgactcgttttttgtattttattcgttggtttttat

SEQ ID NO: 222 - DNA, 21 bp, Artificial Sequence
  Description of Artificial Sequence: Synthetic primer
tcaaacaaaggcgaccacaac

SEQ ID NO: 223 - DNA, 22 bp, Artificial Sequence
  Description of Artificial Sequence: Synthetic primer
tatgaactgcctatgcgacaac

SEQ ID NO: 224 - DNA, 55 bp, Artificial Sequence
  Description of Artificial Sequence: Synthetic primer
  Description of Combined DNA/RNA Molecule: Synthetic primer
tatgaactgcctatgcgacaacatactatactatcgaacgaacgtctctgaaaag

SEQ ID NO: 225 - DNA, 27 bp, Artificial Sequence
  Description of Artificial Sequence: Synthetic primer
  Description of Combined DNA/RNA Molecule: Synthetic primer
cgtatttcgagtttagcgtgtcgggaa

SEQ ID NO: 226 - DNA, 36 bp, Artificial Sequence
  Description of Artificial Sequence: Synthetic primer
  Description of Combined DNA/RNA Molecule: Synthetic primer
ggtgtcgtggccgacccatactaaaaacgacgaaat

SEQ ID NO: 227 - DNA, 44 bp, Artificial Sequence
  Description of Artificial Sequence: Synthetic oligonucleotide
  Description of Combined DNA/RNA Molecule: Synthetic oligonucleotide
tcgcaacgtgccgaatacacgtgtcggaggtcgtttggcgttta

SEQ ID NO: 228 - DNA, 50 bp, Artificial Sequence
  Description of Artificial Sequence: Synthetic oligonucleotide
gttcgtcgttttcgttttaggttttcgcggttgttgcacggtcgagctaa

SEQ ID NO: 229 - DNA, 30 bp, Artificial Sequence
  Description of Artificial Sequence: Synthetic probe
aagtttggcgttcgtcgttttcgttttagg

SEQ ID NO: 230 - DNA, 19 bp, Artificial Sequence
  Description of Artificial Sequence: Synthetic primer
tcgcaacgtgccgaataca

SEQ ID NO: 231 - DNA, 19 bp, Artificial Sequence
  Description of Artificial Sequence: Synthetic primer
ttagctcgaccgtgcaaca

SEQ ID NO: 232 - DNA, 48 bp, Artificial Sequence
  Description of Artificial Sequence: Synthetic primer
  Description of Combined DNA/RNA Molecule: Synthetic primer
ttagctcgaccgtgcaacacatactaaaaacgacgaaaccgtgaaaat

SEQ ID NO: 233 - DNA, 26 bp, Artificial Sequence
  Description of Artificial Sequence: Synthetic primer
  Description of Combined DNA/RNA Molecule: Synthetic primer
tataggacgtcgatggcgatagtttc

SEQ ID NO: 234 - DNA, 38 bp, Artificial Sequence
  Description of Artificial Sequence: Synthetic primer
  Description of Combined DNA/RNA Molecule: Synthetic primer
ggtgtcgtggcgatccgcatatcaaaaactaccucgcg

SEQ ID NO: 235 - DNA, 52 bp, Artificial Sequence
  Description of Artificial Sequence: Synthetic oligonucleotide
  Description of Combined DNA/RNA Molecule: Synthetic oligonucleotide
ttcagagcacctgcgtaccacgtcgatggcgatagttttttttgctcgttcc

SEQ ID NO: 236 - DNA, 60 bp, Artificial Sequence
  Description of Artificial Sequence: Synthetic oligonucleotide
gttttagtttagatattttttgtcgttgcgcgtagtttttgggttcttcggctggctcaa

SEQ ID NO: 237 - DNA, 39 bp, Artificial Sequence
  Description of Artificial Sequence: Synthetic probe
aatttgctcgttttagtttagatattttttgtcgttgcg

SEQ ID NO: 238 - DNA, 19 bp, Artificial Sequence
  Description of Artificial Sequence: Synthetic primer
ttcagagcacctgcgtacc

SEQ ID NO: 239 - DNA, 19 bp, Artificial Sequence
  Description of Artificial Sequence: Synthetic primer
ttgagccagccgaagaacc

SEQ ID NO: 240 - DNA, 54 bp, Artificial Sequence
  Description of Artificial Sequence: Synthetic primer
  Description of Combined DNA/RNA Molecule: Synthetic primer
ttgagccagccgaagaacccatatcaaaaactacctcgcaaaaactatgcgcag

SEQ ID NO: 241 - DNA, 22 bp, Artificial Sequence
  Description of Artificial Sequence: Synthetic primer
  Description of Combined DNA/RNA Molecule: Synthetic primer
gtgggtgttgggttggtugtta

SEQ ID NO: 242 - DNA, 32 bp, Artificial Sequence
  Description of Artificial Sequence: Synthetic primer
  Description of Combined DNA/RNA Molecule: Synthetic primer
ggtgtcgtggcaaacccacccgcaaaaucctt

SEQ ID NO: 243 - DNA, 47 bp, Artificial Sequence
  Description of Artificial Sequence: Synthetic oligonucleotide
  Description of Combined DNA/RNA Molecule: Synthetic oligonucleotide
tacacgtggatatctccgaccgggtgttgggttggttgtcgcggtta

SEQ ID NO: 244 - DNA, 43 bp, Artificial Sequence
  Description of Artificial Sequence: Synthetic oligonucleotide
ggtcgcggacgtgttggagaggggtgctagtcacacagttcca

SEQ ID NO: 245 - DNA, 20 bp, Artificial Sequence
  Description of Artificial Sequence: Synthetic probe
tattgtcgcggtcgcggacg

SEQ ID NO: 246 - DNA, 21 bp, Artificial Sequence
  Description of Artificial Sequence: Synthetic primer
tacacgtggatatctccgacc

SEQ ID NO: 247 - DNA, 21 bp, Artificial Sequence
  Description of Artificial Sequence: Synthetic primer
tggaactgtgtgactagcacc

SEQ ID NO: 248 - DNA, 48 bp, Artificial Sequence
  Description of Artificial Sequence: Synthetic primer
  Description of Combined DNA/RNA Molecule: Synthetic primer
tggaactgtgtgactagcaccccgcaaaatcctctccaacatguccgt

SEQ ID NO: 249 - DNA, 21 bp, Artificial Sequence
  Description of Artificial Sequence: Synthetic primer
  Description of Combined DNA/RNA Molecule: Synthetic primer
ggtagggagggcggtagggtg

SEQ ID NO: 250 - DNA, 36 bp, Artificial Sequence
  Description of Artificial Sequence: Synthetic primer
  Description of Combined DNA/RNA Molecule: Synthetic primer
ggtgtcgtggcgcgaaaaaaactacgaaaccucaat

SEQ ID NO: 251 - DNA, 41 bp, Artificial Sequence
  Description of Artificial Sequence: Synthetic oligonucleotide
  Description of Combined DNA/RNA Molecule: Synthetic oligonucleotide
tccgggtatacactgtcccatgggtcggcgatcagcgggct

SEQ ID NO: 252 - DNA, 47 bp, Artificial Sequence
  Description of Artificial Sequence: Synthetic oligonucleotide
gggtcgaagattggaagttcgggtcgtggttaacagaggacaggcca

SEQ ID NO: 253 - DNA, 27 bp, Artificial Sequence
  Description of Artificial Sequence: Synthetic probe
ttgatcagcgggtcgaagattggaagt

SEQ ID NO: 254 - DNA, 20 bp, Artificial Sequence
  Description of Artificial Sequence: Synthetic primer
tccgggtatacactgtccca

SEQ ID NO: 255 - DNA, 21 bp, Artificial Sequence
  Description of Artificial Sequence: Synthetic primer
tggcctgtcctctgttaacca

SEQ ID NO: 256 - DNA, 52 bp, Artificial Sequence
  Description of Artificial Sequence: Synthetic primer
  Description of Combined DNA/RNA Molecule: Synthetic primer
tggcctgtcctctgttaaccagcgaaaaaaactacgaaacctcaatgaccca

SEQ ID NO: 257 - DNA, 25 bp, Artificial Sequence
  Description of Artificial Sequence: Synthetic primer
  Description of Combined DNA/RNA Molecule: Synthetic primer
gggtttagggcgtttatttcgtttg

SEQ ID NO: 258 - DNA, 35 bp, Artificial Sequence
  Description of Artificial Sequence: Synthetic primer
  Description of Combined DNA/RNA Molecule: Synthetic primer
ggtgtcgtggcgaaacgcccgaaatctaaaaaaca

SEQ ID NO: 259 - DNA, 54 bp, Artificial Sequence
  Description of Artificial Sequence: Synthetic oligonucleotide
  Description of Combined DNA/RNA Molecule: Synthetic oligonucleotide
ttcagcagcctggcatcacagggcgtttatttcgtttatttaagggttcgcgcg

SEQ ID NO: 260 - DNA, 52 bp, Artificial Sequence
  Description of Artificial Sequence: Synthetic oligonucleotide
gcgtaggagtgaattttttcgcgttttatttgcgtggagcgctaaggttgca

SEQ ID NO: 261 - DNA, 30 bp, Artificial Sequence
  Description of Artificial Sequence: Synthetic probe
ccagggttcgcgtaggagtgaattttttcg

SEQ ID NO: 262 - DNA, 19 bp, Artificial Sequence
  Description of Artificial Sequence: Synthetic primer
ttcagcagcctggcatcac

SEQ ID NO: 263 - DNA, 19 bp, Artificial Sequence
  Description of Artificial Sequence: Synthetic primer
tgcaaccttagcgctccac

SEQ ID NO: 264 - DNA, 53 bp, Artificial Sequence
  Description of Artificial Sequence: Synthetic primer
  Description of Combined DNA/RNA Molecule: Synthetic primer
tgcaaccttagcgctccaccccgaaatctaaaaaacgcaaataaaatgcgaag

SEQ ID NO: 265 - DNA, 36 bp, Artificial Sequence
  Description of Artificial Sequence: Synthetic primer
  Description of Combined DNA/RNA Molecule: Synthetic primer
atgttttatcgttgttaggtatttaattatcggttg

SEQ ID NO: 266 - DNA, 44 bp, Artificial Sequence
  Description of Artificial Sequence: Synthetic primer
  Description of Combined DNA/RNA Molecule: Synthetic primer
ggtgtcgtggccgtaaaaactaaaaaaaaaacaaacttcctctg

SEQ ID NO: 267 - DNA, 64 bp, Artificial Sequence
  Description of Artificial Sequence: Synthetic oligonucleotide
  Description of Combined DNA/RNA Molecule: Synthetic oligonucleotide
tcagacgcactaaacaggcaatgttaggtatttaattatcggttagtgttttttgactcgcgta

SEQ ID NO: 268 - DNA, 54 bp, Artificial Sequence
  Description of Artificial Sequence: Synthetic oligonucleotide
gcgcgatatatggcgtattaatcgtatcgtagaggttgcggatcgtcgtgtgaa

SEQ ID NO: 269 - DNA, 32 bp, Artificial Sequence
  Description of Artificial Sequence: Synthetic probe
aattgactcgcgcgatatatggcgtattaatc

SEQ ID NO: 270 - DNA, 21 bp, Artificial Sequence
  Description of Artificial Sequence: Synthetic primer
tcagacgcactaaacaggcaa

SEQ ID NO: 271 - DNA, 19 bp, Artificial Sequence
  Description of Artificial Sequence: Synthetic primer
ttcacacgacgatccgcaa

SEQ ID NO: 272 - DNA, 59 bp, Artificial Sequence
  Description of Artificial Sequence: Synthetic primer
  Description of Combined DNA/RNA Molecule: Synthetic primer
ttcacacgacgatccgcaacgtaaaaactaaaaaaaaaacaaacttcctctatgataca

SEQ ID NO: 273 - DNA, 23 bp, Artificial Sequence
  Description of Artificial Sequence: Synthetic primer
  Description of Combined DNA/RNA Molecule: Synthetic primer
cgtcgcgtgttagggttcggaaa

SEQ ID NO: 274 - DNA, 35 bp, Artificial Sequence
  Description of Artificial Sequence: Synthetic primer
  Description of Combined DNA/RNA Molecule: Synthetic primer
ggtgtcgtggcgatacgctcctctaccaacacctg

SEQ ID NO: 275 - DNA, 55 bp, Artificial Sequence
  Description of Artificial Sequence: Synthetic oligonucleotide
  Description of Combined DNA/RNA Molecule: Synthetic oligonucleotide
tcctgctctgaaaacctacacccgtgttagggttcggaagttttgttctcggtct

SEQ ID NO: 276 - DNA, 62 bp, Artificial Sequence
  Description of Artificial Sequence: Synthetic oligonucleotide
ggttcgatattttcgttttacgttgttttttgttcgtaggggttacataggcggcttagaca

SEQ ID NO: 277 - DNA, 35 bp, Artificial Sequence
  Description of Artificial Sequence: Synthetic probe
aatgttctcggttcgatattttcgttttacgttgt

SEQ ID NO: 278 - DNA, 22 bp, Artificial Sequence
  Description of Artificial Sequence: Synthetic primer
tcctgctctgaaaacctacacc

SEQ ID NO: 279 - DNA, 22 bp, Artificial Sequence
  Description of Artificial Sequence: Synthetic primer
tgtctaagccgcctatgtaacc

SEQ ID NO: 280 - DNA, 49 bp, Artificial Sequence
  Description of Artificial Sequence: Synthetic primer
  Description of Combined DNA/RNA Molecule: Synthetic primer
tgtctaagccgcctatgtaacccgctcctctaccaacacctatgaacag

SEQ ID NO: 281 - DNA, 23 bp, Artificial Sequence
  Description of Artificial Sequence: Synthetic primer
  Description of Combined DNA/RNA Molecule: Synthetic primer
gtagtcgagcgttcgagcgcgga

SEQ ID NO: 282 - DNA, 36 bp, Artificial Sequence
  Description of Artificial Sequence: Synthetic primer
  Description of Combined DNA/RNA Molecule: Synthetic primer
ggtgtcgtggcgcgtaaaaaacgaacgtacautaag

SEQ ID NO: 283 - DNA, 43 bp, Artificial Sequence
  Description of Artificial Sequence: Synthetic oligonucleotide
  Description of Combined DNA/RNA Molecule: Synthetic oligonucleotide
tcctcgagccgatgacacagcgttcgagcgcagggatcgttcc

SEQ ID NO: 284 - DNA, 48 bp, Artificial Sequence
  Description of Artificial Sequence: Synthetic oligonucleotide
gtttttttcgtttcggtagttggagcgcgtgtaacgtccgtgggctaa

SEQ ID NO: 285 - DNA, 32 bp, Artificial Sequence
  Description of Artificial Sequence: Synthetic probe
ttagggatcgtttttttcgtttcggtagttgg

SEQ ID NO: 286 - DNA, 19 bp, Artificial Sequence
  Description of Artificial Sequence: Synthetic primer
tcctcgagccgatgacaca

SEQ ID NO: 287 - DNA, 19 bp, Artificial Sequence
  Description of Artificial Sequence: Synthetic primer
ttagcccacggacgttaca

SEQ ID NO: 288 - DNA, 52 bp, Artificial Sequence
  Description of Artificial Sequence: Synthetic primer
  Description of Combined DNA/RNA Molecule: Synthetic primer
ttagcccacggacgttacacgcgtaaaaaacgaacgtacattaaatgcgctt

SEQ ID NO: 289 - DNA, 22 bp, Artificial Sequence
  Description of Artificial Sequence: Synthetic primer
  Description of Combined DNA/RNA Molecule: Synthetic primer
cgcggtcgtaggacgtagggtc

SEQ ID NO: 290 - DNA, 34 bp, Artificial Sequence
  Description of Artificial Sequence: Synthetic primer
  Description of Combined DNA/RNA Molecule: Synthetic primer
ggtgtcgtggtccaacccgaactacaaccgcgca

SEQ ID NO: 291 - DNA, 48 bp, Artificial Sequence
  Description of Artificial Sequence: Synthetic oligonucleotide
  Description of Combined DNA/RNA Molecule: Synthetic oligonucleotide
ttgtctctgcgacccatcaagtaggacgtagggtttggagggcgggac

SEQ ID NO: 292 - DNA, 42 bp, Artificial Sequence
  Description of Artificial Sequence: Synthetic oligonucleotide
gggatttcgtcgcgttgggagggttggtacacgttcggcaca

SEQ ID NO: 293 - DNA, 22 bp, Artificial Sequence
  Description of Artificial Sequence: Synthetic probe
aaggagggcgggatttcgtcgc

SEQ ID NO: 294 - DNA, 20 bp, Artificial Sequence
  Description of Artificial Sequence: Synthetic primer
ttgtctctgcgacccatcaa

SEQ ID NO: 295 - DNA, 19 bp, Artificial Sequence
  Description of Artificial Sequence: Synthetic primer
tgtgccgaacgtgtaccaa

SEQ ID NO: 296 - DNA, 41 bp, Artificial Sequence
  Description of Artificial Sequence: Synthetic primer
  Description of Combined DNA/RNA Molecule: Synthetic primer
tgtgccgaacgtgtaccaacccgacccctcccaatgcgaca

SEQ ID NO: 297 - DNA, 30 bp, Artificial Sequence
  Description of Artificial Sequence: Synthetic primer
  Description of Combined DNA/RNA Molecule: Synthetic primer
cgtttttgtatttcggttattgggagcgga

SEQ ID NO: 298 - DNA, 42 bp, Artificial Sequence
  Description of Artificial Sequence: Synthetic primer
  Description of Combined DNA/RNA Molecule: Synthetic primer
ggtgtcgtggacgcccgaataatttctaaaaataaacgaaag

SEQ ID NO: 299 - DNA, 44 bp, Artificial Sequence
  Description of Artificial Sequence: Synthetic oligonucleotide
  Description of Combined DNA/RNA Molecule: Synthetic oligonucleotide
tttcgctcgacgcataccacggttattgggagcgggatcgtgaa

SEQ ID NO: 300 - DNA, 51 bp, Artificial Sequence
  Description of Artificial Sequence: Synthetic oligonucleotide
gtgggagttgtatatgcgtattgcgagttttctggcgcggctactgtaaaa

SEQ ID NO: 301 - DNA, 27 bp, Artificial Sequence
  Description of Artificial Sequence: Synthetic probe
ttcgggatcgtgggagttgtatatgcg

SEQ ID NO: 302 - DNA, 19 bp, Artificial Sequence
  Description of Artificial Sequence: Synthetic primer
tttcgctcgacgcatacca

SEQ ID NO: 303 - DNA, 19 bp, Artificial Sequence
  Description of Artificial Sequence: Synthetic primer
ttttacagtagccgcgcca

SEQ ID NO: 304 - DNA, 57 bp, Artificial Sequence
  Description of Artificial Sequence: Synthetic primer
  Description of Combined DNA/RNA Molecule: Synthetic primer
ttttacagtagccgcgccacccgaataatttctaaaaataaacgaaaacttgcaatg

SEQ ID NO: 305 - DNA, 28 bp, Artificial Sequence
  Description of Artificial Sequence: Synthetic primer
  Description of Combined DNA/RNA Molecule: Synthetic primer
cgtgaggcgttgtgattagaatagttga

SEQ ID NO: 306 - DNA, 37 bp, Artificial Sequence
  Description of Artificial Sequence: Synthetic primer
  Description of Combined DNA/RNA Molecule: Synthetic primer
ggtgtcgtggtaacgcgaccgaaaaaaactacaactt

SEQ ID NO: 307 - DNA, 53 bp, Artificial Sequence
  Description of Artificial Sequence: Synthetic oligonucleotide
  Description of Combined DNA/RNA Molecule: Synthetic oligonucleotide
ttgcacgttgtcctgcacccgttgtgattagaatagttggaggtgaacggtga

SEQ ID NO: 308 - DNA, 49 bp, Artificial Sequence
  Description of Artificial Sequence: Synthetic oligonucleotide
ggtagagtgtcgcgacgattgttaggagtggtagtttcccatgacggca

SEQ ID NO: 309 - DNA, 25 bp, Artificial Sequence
  Description of Artificial Sequence: Synthetic probe
ttggtgaacggtagagtgtcgcgac

SEQ ID NO: 310 - DNA, 19 bp, Artificial Sequence
  Description of Artificial Sequence: Synthetic primer
ttgcacgttgtcctgcacc

SEQ ID NO: 311 - DNA, 20 bp, Artificial Sequence
  Description of Artificial Sequence: Synthetic primer
tgccgtcatgggaaactacc

SEQ ID NO: 312 - DNA, 55 bp, Artificial Sequence
  Description of Artificial Sequence: Synthetic primer
  Description of Combined DNA/RNA Molecule: Synthetic primer
tgccgtcatgggaaactaccaccgaaaaaaactacaactcctaacaattgucgca

SEQ ID NO: 313 - DNA, 31 bp, Artificial Sequence
  Description of Artificial Sequence: Synthetic primer
  Description of Combined DNA/RNA Molecule: Synthetic primer
tttaggagttttaatggagatacgtcgggta

SEQ ID NO: 314 - DNA, 35 bp, Artificial Sequence
  Description of Artificial Sequence: Synthetic primer
  Description of Combined DNA/RNA Molecule: Synthetic primer
ggtgtcgtggccgaactataccgcgctaacuacca

SEQ ID NO: 315 - DNA, 48 bp, Artificial Sequence
  Description of Artificial Sequence: Synthetic oligonucleotide
  Description of Combined DNA/RNA Molecule: Synthetic oligonucleotide
ttagccgccaaacgtaccatgggaacggaggtagtttttgctcggacg

SEQ ID NO: 316 - DNA, 50 bp, Artificial Sequence
  Description of Artificial Sequence: Synthetic oligonucleotide
ggatagcgaaattcgcgaggtttaggagagtgggcaggaacacgatagta

SEQ ID NO: 317 - DNA, 27 bp, Artificial Sequence
  Description of Artificial Sequence: Synthetic probe
cctttgctcggatagcgaaattcgcga

SEQ ID NO: 318 - DNA, 19 bp, Artificial Sequence
  Description of Artificial Sequence: Synthetic primer
ttagccgccaaacgtacca

SEQ ID NO: 319 - DNA, 20 bp, Artificial Sequence
  Description of Artificial Sequence: Synthetic primer
tactatcgtgttcctgccca

SEQ ID NO: 320 - DNA, 49 bp, Artificial Sequence
  Description of Artificial Sequence: Synthetic primer
  Description of Combined DNA/RNA Molecule: Synthetic primer
tactatcgtgttcctgcccacgaactataccgcgctaactactgctctt

SEQ ID NO: 321 - DNA, 23 bp, Artificial Sequence
  Description of Artificial Sequence: Synthetic primer
  Description of Combined DNA/RNA Molecule: Synthetic primer
cgagtagttgcggttggcgatga

SEQ ID NO: 322 - DNA, 35 bp, Artificial Sequence
  Description of Artificial Sequence: Synthetic primer
  Description of Combined DNA/RNA Molecule: Synthetic primer
ggtgtcgtggccaactcctcctcctcctaacgcgt

SEQ ID NO: 323 - DNA, 45 bp, Artificial Sequence
  Description of Artificial Sequence: Synthetic oligonucleotide
  Description of Combined DNA/RNA Molecule: Synthetic oligonucleotide
ttcgtacctcggcacaccagcggttggcgatggaattatcggcac

SEQ ID NO: 324 - DNA, 44 bp, Artificial Sequence
  Description of Artificial Sequence: Synthetic oligonucleotide
ggcgtaggagtaggaggagaggcgtggctccgttactctgtcga

SEQ ID NO: 325 - DNA, 31 bp, Artificial Sequence
  Description of Artificial Sequence: Synthetic probe
ccaattatcggcgtaggagtaggaggagagg

SEQ ID NO: 326 - DNA, 19 bp, Artificial Sequence
  Description of Artificial Sequence: Synthetic primer
ttcgtacctcggcacacca

SEQ ID NO: 327 - DNA, 20 bp, Artificial Sequence
  Description of Artificial Sequence: Synthetic primer
tcgacagagtaacggagcca

SEQ ID NO: 328 - DNA, 47 bp, Artificial Sequence
  Description of Artificial Sequence: Synthetic primer
  Description of Combined DNA/RNA Molecule: Synthetic primer
tcgacagagtaacggagccaccaactcctcctcctcctaatgcgcgt

SEQ ID NO: 329 - DNA, 23 bp, Artificial Sequence
  Description of Artificial Sequence: Synthetic primer
  Description of Combined DNA/RNA Molecule: Synthetic primer
aggttggtgttggtggtcggcga

SEQ ID NO: 330 - DNA, 42 bp, Artificial Sequence
  Description of Artificial Sequence: Synthetic primer
  Description of Combined DNA/RNA Molecule: Synthetic primer
ggtgtcgtggcgctaacaatacctaaataaccgaaaccgcgt

SEQ ID NO: 331 - DNA, 44 bp, Artificial Sequence
  Description of Artificial Sequence: Synthetic oligonucleotide
  Description of Combined DNA/RNA Molecule: Synthetic oligonucleotide
tttgcctcttgtaggtgccagaggttgggtgtagggagcgataa

SEQ ID NO: 332 - DNA, 45 bp, Artificial Sequence
  Description of Artificial Sequence: Synthetic oligonucleotide
gatggtggaggtgatagggtggttggtgggcaacgcggatattca

SEQ ID NO: 333 - DNA, 23 bp, Artificial Sequence
  Description of Artificial Sequence: Synthetic probe
aaagggagcgatggtggaggtga

SEQ ID NO: 334 - DNA, 20 bp, Artificial Sequence
  Description of Artificial Sequence: Synthetic primer
tttgcctcttgtaggtgcca

SEQ ID NO: 335 - DNA, 19 bp, Artificial Sequence
  Description of Artificial Sequence: Synthetic primer
tgaatatccgcgttgccca

SEQ ID NO: 336 - DNA, 52 bp, Artificial Sequence
  Description of Artificial Sequence: Synthetic primer
  Description of Combined DNA/RNA Molecule: Synthetic primer
tgaatatccgcgttgcccataacaatacctaaataaccgaaaccgtgccaat

SEQ ID NO: 337 - DNA, 29 bp, Artificial Sequence
  Description of Artificial Sequence: Synthetic primer
  Description of Combined DNA/RNA Molecule: Synthetic primer
gatttggttaaatggacgggattautaaa

SEQ ID NO: 338 - DNA, 29 bp, Artificial Sequence
  Description of Artificial Sequence: Synthetic primer
  Description of Combined DNA/RNA Molecule: Synthetic primer
ggtgtcgtggtcgcctccccgaccgatct

SEQ ID NO: 339 - DNA, 50 bp, Artificial Sequence
  Description of Artificial Sequence: Synthetic oligonucleotide
  Description of Combined DNA/RNA Molecule: Synthetic oligonucleotide
tcgtagactcgctatcgccaggacgggattattaaggtaagcagcgggac

SEQ ID NO: 340 - DNA, 39 bp, Artificial Sequence
  Description of Artificial Sequence: Synthetic oligonucleotide
ggagtaacggacgcgggcggtggtgagcagggatgagca

SEQ ID NO: 341 - DNA, 23 bp, Artificial Sequence
  Description of Artificial Sequence: Synthetic probe
acaagcagcggagtaacggacgc

SEQ ID NO: 342 - DNA, 20 bp, Artificial Sequence
  Description of Artificial Sequence: Synthetic primer
tcgtagactcgctatcgcca

SEQ ID NO: 343 - DNA, 19 bp, Artificial Sequence
  Description of Artificial Sequence: Synthetic primer
tgctcatccctgctcacca

SEQ ID NO: 344 - DNA, 39 bp, Artificial Sequence
  Description of Artificial Sequence: Synthetic primer
  Description of Combined DNA/RNA Molecule: Synthetic primer
tgctcatccctgctcaccatcgcctccccgactgatcct

SEQ ID NO: 345 - DNA, 21 bp, Artificial Sequence
  Description of Artificial Sequence: Synthetic primer
  Description of Combined DNA/RNA Molecule: Synthetic primer
cgttcgtagcggaggcggagg

SEQ ID NO: 346 - DNA, 34 bp, Artificial Sequence
  Description of Artificial Sequence: Synthetic primer
  Description of Combined DNA/RNA Molecule: Synthetic primer
ggtgtcgtggaaaaacgccccaaatctccaaacg

SEQ ID NO: 347 - DNA, 45 bp, Artificial Sequence
  Description of Artificial Sequence: Synthetic oligonucleotide
  Description of Combined DNA/RNA Molecule: Synthetic oligonucleotide
tccctcgtcatctcccttacccggagggagaagttcgtgcgtcac

SEQ ID NO: 348 - DNA, 58 bp, Artificial Sequence
  Description of Artificial Sequence: Synthetic oligonucleotide
gtcgtttcgttttcggaatttggagttttatgttattttggtcttggtgatggagcga

SEQ ID NO: 349 - DNA, 26 bp, Artificial Sequence
  Description of Artificial Sequence: Synthetic probe
ccttcgtgcgtcgtttcgttttcgga

SEQ ID NO: 350 - DNA, 21 bp, Artificial Sequence
  Description of Artificial Sequence: Synthetic primer
tccctcgtcatctcccttacc

SEQ ID NO: 351 - DNA, 19 bp, Artificial Sequence
  Description of Artificial Sequence: Synthetic primer
tcgctccatcaccaagacc

SEQ ID NO: 352 - DNA, 60 bp, Artificial Sequence
  Description of Artificial Sequence: Synthetic primer
  Description of Combined DNA/RNA Molecule: Synthetic primer
tcgctccatcaccaagaccccaaactttaaaaataacataaaactccaaattctgaaaat

SEQ ID NO: 353 - DNA, 26 bp, Artificial Sequence
  Description of Artificial Sequence: Synthetic primer
  Description of Combined DNA/RNA Molecule: Synthetic primer
gtcggaatattgggaagaggagataa

SEQ ID NO: 354 - DNA, 41 bp, Artificial Sequence
  Description of Artificial Sequence: Synthetic primer
  Description of Combined DNA/RNA Molecule: Synthetic primer
ggtgtcgtggcctcactctaattataataaccgctcaaaac

SEQ ID NO: 355 - DNA, 55 bp, Artificial Sequence
  Description of Artificial Sequence: Synthetic oligonucleotide
  Description of Combined DNA/RNA Molecule: Synthetic oligonucleotide
ttctagataccacggacgcaccggaatattgggaagaggagatagggttcgttgg

SEQ ID NO: 356 - DNA, 64 bp, Artificial Sequence
  Description of Artificial Sequence: Synthetic oligonucleotide
gttaaggttaaagtatagttttatcgagtgaatttgcggattttgtgttggtgtgcaaagctga

SEQ ID NO: 357 - DNA, 40 bp, Artificial Sequence
  Description of Artificial Sequence: Synthetic probe
ccagggttcgttaaggttaaagtatagttttatcgagtga

SEQ ID NO: 358 - DNA, 21 bp, Artificial Sequence
  Description of Artificial Sequence: Synthetic primer
ttctagataccacggacgcac

SEQ ID NO: 359 - DNA, 20 bp, Artificial Sequence
  Description of Artificial Sequence: Synthetic primer
tcagctttgcacaccaacac

SEQ ID NO: 360 - DNA, 58 bp, Artificial Sequence
  Description of Artificial Sequence: Synthetic primer
  Description of Combined DNA/RNA Molecule: Synthetic primer
tcagctttgcacaccaacacctcactctaattataataaccgctcaaaatctgcaaac

SEQ ID NO: 361 - DNA, 23 bp, Artificial Sequence
  Description of Artificial Sequence: Synthetic primer
  Description of Combined DNA/RNA Molecule: Synthetic primer
cgcgcgcggttataattcggatc

SEQ ID NO: 362 - DNA, 38 bp, Artificial Sequence
  Description of Artificial Sequence: Synthetic primer
  Description of Combined DNA/RNA Molecule: Synthetic primer
ggtgtcgtggtacatacccgaccgctaaaataccgaac

SEQ ID NO: 363 - DNA, 51 bp, Artificial Sequence
  Description of Artificial Sequence: Synthetic oligonucleotide
  Description of Combined DNA/RNA Molecule: Synthetic oligonucleotide
tcgctcttcagcctcctacattataattcggattgggcgcgttctcggtgc

SEQ ID NO: 364 - DNA, 62 bp, Artificial Sequence
  Description of Artificial Sequence: Synthetic oligonucleotide
ggtatttcgtatttttgcgcgcgttttatatttcgtattctgttctgggaattattgccgga

SEQ ID NO: 365 - DNA, 30 bp, Artificial Sequence
  Description of Artificial Sequence: Synthetic probe
ttcgttctcggtatttcgtatttttgcgcg

SEQ ID NO: 366 - DNA, 20 bp, Artificial Sequence
  Description of Artificial Sequence: Synthetic primer
tcgctcttcagcctcctaca

SEQ ID NO: 367 - DNA, 22 bp, Artificial Sequence
  Description of Artificial Sequence: Synthetic primer
tccggcaataattcccagaaca

SEQ ID NO: 368 - DNA, 59 bp, Artificial Sequence
  Description of Artificial Sequence: Synthetic primer
  Description of Combined DNA/RNA Molecule: Synthetic primer
tccggcaataattcccagaacaccgctaaaataccgaatacgaaatataaaatgcgcgt

SEQ ID NO: 369 - DNA, 27 bp, Artificial Sequence
  Description of Artificial Sequence: Synthetic primer
  Description of Combined DNA/RNA Molecule: Synthetic primer
tcgttattaggttggatgcgtagcgca

SEQ ID NO: 370 - DNA, 29 bp, Artificial Sequence
  Description of Artificial Sequence: Synthetic primer
  Description of Combined DNA/RNA Molecule: Synthetic primer
ggtgtcgtggtccgccccccgaaaccgct

SEQ ID NO: 371 - DNA, 44 bp, Artificial Sequence
  Description of Artificial Sequence: Synthetic oligonucleotide
  Description of Combined DNA/RNA Molecule: Synthetic oligonucleotide
taccctcctagctccgtacacgtagcgcgatggagaagcgtata

SEQ ID NO: 372 - DNA, 52 bp, Artificial Sequence
  Description of Artificial Sequence: Synthetic oligonucleotide
gtacgaggttcggtaggttttttatgtttgggctgtgttgtctggtggtgca

SEQ ID NO: 373 - DNA, 27 bp, Artificial Sequence
  Description of Artificial Sequence: Synthetic probe
aagagaagcgtacgaggttcggtaggt

SEQ ID NO: 374 - DNA, 20 bp, Artificial Sequence
  Description of Artificial Sequence: Synthetic primer
taccctcctagctccgtaca

SEQ ID NO: 375 - DNA, 19 bp, Artificial Sequence
  Description of Artificial Sequence: Synthetic primer
tgcaccaccagacaacaca

SEQ ID NO: 376 - DNA, 40 bp, Artificial Sequence
  Description of Artificial Sequence: Synthetic primer
  Description of Combined DNA/RNA Molecule: Synthetic primer
tgcaccaccagacaacacaccgcgccaaacccttgcccag

SEQ ID NO: 377 - DNA, 25 bp, Artificial Sequence
  Description of Artificial Sequence: Synthetic primer
  Description of Combined DNA/RNA Molecule: Synthetic primer
aagttgcggttgagttgttcgaatc

SEQ ID NO: 378 - DNA, 45 bp, Artificial Sequence
  Description of Artificial Sequence: Synthetic primer
  Description of Combined DNA/RNA Molecule: Synthetic primer
ggtgtcgtggctaataaacgtaataccctaactacaatacutcct

SEQ ID NO: 379 - DNA, 47 bp, Artificial Sequence
  Description of Artificial Sequence: Synthetic oligonucleotide
  Description of Combined DNA/RNA Molecule: Synthetic oligonucleotide
ttggcaactctccacccaagcggttgagttgttcgaatttgcggagg

SEQ ID NO: 380 - DNA, 46 bp, Artificial Sequence
  Description of Artificial Sequence: Synthetic oligonucleotide
ggaaaacggtgcgtatcgggttgggttgtattgcgccaggatagca

SEQ ID NO: 381 - DNA, 27 bp, Artificial Sequence
  Description of Artificial Sequence: Synthetic probe
acaatttgcggaaaacggtgcgtatcg

SEQ ID NO: 382 - DNA, 19 bp, Artificial Sequence
  Description of Artificial Sequence: Synthetic primer
ttggcaactctccacccaa

SEQ ID NO: 383 - DNA, 21 bp, Artificial Sequence
  Description of Artificial Sequence: Synthetic primer
tgctatcctggcgcaatacaa

SEQ ID NO: 384 - DNA, 52 bp, Artificial Sequence
  Description of Artificial Sequence: Synthetic primer
  Description of Combined DNA/RNA Molecule: Synthetic primer
tgctatcctggcgcaatacaacctaactacaatacttccccaacctgataca

SEQ ID NO: 385 - DNA, 25 bp, Artificial Sequence
  Description of Artificial Sequence: Synthetic primer
  Description of Combined DNA/RNA Molecule: Synthetic primer
gggcgtttagggtcgttttcggtca

SEQ ID NO: 386 - DNA, 36 bp, Artificial Sequence
  Description of Artificial Sequence: Synthetic primer
  Description of Combined DNA/RNA Molecule: Synthetic primer
ggtgtcgtgggccccgacgacgacaacgaaaaaaca

SEQ ID NO: 387 - DNA, 47 bp, Artificial Sequence
  Description of Artificial Sequence: Synthetic oligonucleotide
  Description of Combined DNA/RNA Molecule: Synthetic oligonucleotide
ttgcaaaccacccggacaaggcgtttagggtcgttttcgatcgggct

SEQ ID NO: 388 - DNA, 55 bp, Artificial Sequence
  Description of Artificial Sequence: Synthetic oligonucleotide
gggtcgtttcgtgtttatgttcgtttggattttcgttggtcagcatcgactccta

SEQ ID NO: 389 - DNA, 29 bp, Artificial Sequence
  Description of Artificial Sequence: Synthetic probe
ccttcgatcgggtcgtttcgtgtttatgt

SEQ ID NO: 390 - DNA, 19 bp, Artificial Sequence
  Description of Artificial Sequence: Synthetic primer
ttgcaaaccacccggacaa

SEQ ID NO: 391 - DNA, 20 bp, Artificial Sequence
  Description of Artificial Sequence: Synthetic primer
taggagtcgatgctgaccaa

SEQ ID NO: 392 - DNA, 58 bp, Artificial Sequence
  Description of Artificial Sequence: Synthetic primer
  Description of Combined DNA/RNA Molecule: Synthetic primer
taggagtcgatgctgaccaagaaaaaacgataaaaaatacgaaaatccaaatgaacac

SEQ ID NO: 393 - DNA, 27 bp, Artificial Sequence
  Description of Artificial Sequence: Synthetic primer
  Description of Combined DNA/RNA Molecule: Synthetic primer
gcgttacgaattcgaggttgtcgtttg

SEQ ID NO: 394 - DNA, 41 bp, Artificial Sequence
  Description of Artificial Sequence: Synthetic primer
  Description of Combined DNA/RNA Molecule: Synthetic primer
ggtgtcgtggcgcttctaaaaaaaaataccaaacccctaac

SEQ ID NO: 395 - DNA, 56 bp, Artificial Sequence
  Description of Artificial Sequence: Synthetic oligonucleotide
  Description of Combined DNA/RNA Molecule: Synthetic oligonucleotide
tccgactttagtgcgtcacaatcgaggttgtcgtttaattatagaggactcgttct

SEQ ID NO: 396 - DNA, 69 bp, Artificial Sequence
  Description of Artificial Sequence: Synthetic oligonucleotide
gtttcgtttatttttcgagtgttttatagatgtcgtttttttattagggttgtgggtctcgctcgtata

SEQ ID NO: 397 - DNA, 39 bp, Artificial Sequence
  Description of Artificial Sequence: Synthetic probe
ttgggactcgtttcgtttatttttcgagtgttttataga

SEQ ID NO: 398 - DNA, 21 bp, Artificial Sequence
  Description of Artificial Sequence: Synthetic primer
tccgactttagtgcgtcacaa

SEQ ID NO: 399 - DNA, 20 bp, Artificial Sequence
  Description of Artificial Sequence: Synthetic primer
tatacgagcgagacccacaa

SEQ ID NO: 400 - DNA, 61 bp, Artificial Sequence
  Description of Artificial Sequence: Synthetic primer
  Description of Combined DNA/RNA Molecule: Synthetic primer
tatacgagcgagacccacaatctaaaaaaaaataccaaacccctaataaaaaaatgacatt

SEQ ID NO: 401 - DNA, 26 bp, Artificial Sequence
  Description of Artificial Sequence: Synthetic primer
  Description of Combined DNA/RNA Molecule: Synthetic primer
gttgcggtaacgggaagtttcgttaa

SEQ ID NO: 402 - DNA, 43 bp, Artificial Sequence
  Description of Artificial Sequence: Synthetic primer
  Description of Combined DNA/RNA Molecule: Synthetic primer
ggtgtcgtggaatacgaaaaatactcttctcctcgttcucccg

SEQ ID NO: 403 - DNA, 51 bp, Artificial Sequence
  Description of Artificial Sequence: Synthetic oligonucleotide
  Description of Combined DNA/RNA Molecule: Synthetic oligonucleotide
ttctaggcgacacgacaacaacgggaagtttcgttagtggttggtcgatcg

SEQ ID NO: 404 - DNA, 55 bp, Artificial Sequence
  Description of Artificial Sequence: Synthetic oligonucleotide
gattagatcgatagcggtaagtatttcgggttggtgtgtgggtactgtccgtgga

SEQ ID NO: 405 - DNA, 37 bp, Artificial Sequence
  Description of Artificial Sequence: Synthetic probe
ccgttggtcgattagatcgatagcggtaagtatttcg

SEQ ID NO: 406 - DNA, 20 bp, Artificial Sequence
  Description of Artificial Sequence: Synthetic primer
ttctaggcgacacgacaaca

SEQ ID NO: 407 - DNA, 19 bp, Artificial Sequence
  Description of Artificial Sequence: Synthetic primer
tccacggacagtacccaca

SEQ ID NO: 408 - DNA, 44 bp, Artificial Sequence
  Description of Artificial Sequence: Synthetic primer
  Description of Combined DNA/RNA Molecule: Synthetic primer
tccacggacagtacccacacgttctcccacaccaacctgaaatg

SEQ ID NO: 409 - DNA, 25 bp, Artificial Sequence
  Description of Artificial Sequence: Synthetic primer
  Description of Combined DNA/RNA Molecule: Synthetic primer
gtcggtgttgtagagttcgcgaggc

SEQ ID NO: 410 - DNA, 39 bp, Artificial Sequence
  Description of Artificial Sequence: Synthetic primer
  Description of Combined DNA/RNA Molecule: Synthetic primer
ggtgtcgtggccaataacactactacccccaaacuttct

SEQ ID NO: 411 - DNA, 47 bp, Artificial Sequence
  Description of Artificial Sequence: Synthetic oligonucleotide
  Description of Combined DNA/RNA Molecule: Synthetic oligonucleotide
tctgcccaaaatactgcacaacgaggtgtttgggagttgagcgagga

SEQ ID NO: 412 - DNA, 63 bp, Artificial Sequence
  Description of Artificial Sequence: Synthetic oligonucleotide
gagagttgtagatttggaggtttttatattttcgtgtaggcgttgaaactgaggcggtgttca

SEQ ID NO: 413 - DNA, 32 bp, Artificial Sequence
  Description of Artificial Sequence: Synthetic probe
ttgttgagcgagagttgtagatttggaggttt

SEQ ID NO: 414 - DNA, 21 bp, Artificial Sequence
  Description of Artificial Sequence: Synthetic primer
tctgcccaaaatactgcacaa

SEQ ID NO: 415 - DNA, 21 bp, Artificial Sequence
  Description of Artificial Sequence: Synthetic primer
tgaacaccgcctcagtttcaa

SEQ ID NO: 416 - DNA, 47 bp, Artificial Sequence
  Description of Artificial Sequence: Synthetic primer
  Description of Combined DNA/RNA Molecule: Synthetic primer
tgaacaccgcctcagtttcaacccaaactttccgcctacatgaaaac

SEQ ID NO: 417 - DNA, 23 bp, Artificial Sequence
  Description of Artificial Sequence: Synthetic primer
  Description of Combined DNA/RNA Molecule: Synthetic primer
ggagacggttattcgcgcgggaa

SEQ ID NO: 418 - DNA, 38 bp, Artificial Sequence
  Description of Artificial Sequence: Synthetic primer
  Description of Combined DNA/RNA Molecule: Synthetic primer
ggtgtcgtggaaactccgaaaccaaaaaaactcaaaag

SEQ ID NO: 419 - DNA, 44 bp, Artificial Sequence
  Description of Artificial Sequence: Synthetic oligonucleotide
  Description of Combined DNA/RNA Molecule: Synthetic oligonucleotide
ttgcatttcgttagcgacacaagtgcgttacgcgggatcggaat

SEQ ID NO: 420 - DNA, 53 bp, Artificial Sequence
  Description of Artificial Sequence: Synthetic oligonucleotide
ggagcgtttattagtcgttaggatttcggagcgtgtgagtcgatctacccgca

SEQ ID NO: 421 - DNA, 31 bp, Artificial Sequence
  Description of Artificial Sequence: Synthetic probe
ttcgggatcggagcgtttattagtcgttagg

SEQ ID NO: 422 - DNA, 21 bp, Artificial Sequence
  Description of Artificial Sequence: Synthetic primer
ttgcatttcgttagcgacaca

SEQ ID NO: 423 - DNA, 20 bp, Artificial Sequence
  Description of Artificial Sequence: Synthetic primer
tgcgggtagatcgactcaca

SEQ ID NO: 424 - DNA, 54 bp, Artificial Sequence
  Description of Artificial Sequence: Synthetic primer
  Description of Combined DNA/RNA Molecule: Synthetic primer
tgcgggtagatcgactcacaaaaaactcaaaaataatcgaaacgctctgaaatt

SEQ ID NO: 425 - DNA, 20 bp, Artificial Sequence
  Description of Artificial Sequence: Synthetic primer
  Description of Combined DNA/RNA Molecule: Synthetic primer
gaggtttggttgcgcgggac

SEQ ID NO: 426 - DNA, 35 bp, Artificial Sequence
  Description of Artificial Sequence: Synthetic primer
  Description of Combined DNA/RNA Molecule: Synthetic primer
ggtgtcgtggcccacactaaccttcctacgcacct

SEQ ID NO: 427 - DNA, 43 bp, Artificial Sequence
  Description of Artificial Sequence: Synthetic oligonucleotide
  Description of Combined DNA/RNA Molecule: Synthetic oligonucleotide
tctcgggaccacaatacgaacggttgcgcgaggttcgcgggcg

SEQ ID NO: 428 - DNA, 56 bp, Artificial Sequence
  Description of Artificial Sequence: Synthetic oligonucleotide
gggtagttttaattttgggttcgtagtttgcgttgggttacgctaagctggtgcca

SEQ ID NO: 429 - DNA, 31 bp, Artificial Sequence
  Description of Artificial Sequence: Synthetic probe
ttggttcgcgggtagttttaattttgggttc

SEQ ID NO: 430 - DNA, 21 bp, Artificial Sequence
  Description of Artificial Sequence: Synthetic primer
tctcgggaccacaatacgaac

SEQ ID NO: 431 - DNA, 20 bp, Artificial Sequence
  Description of Artificial Sequence: Synthetic primer
tggcaccagcttagcgtaac

SEQ ID NO: 432 - DNA, 45 bp, Artificial Sequence
  Description of Artificial Sequence: Synthetic primer
  Description of Combined DNA/RNA Molecule: Synthetic primer
tggcaccagcttagcgtaacaccttcctacgcacccaatgcaaat

SEQ ID NO: 433 - DNA, 28 bp, Artificial Sequence
  Description of Artificial Sequence: Synthetic primer
  Description of Combined DNA/RNA Molecule: Synthetic primer
agttggtgtaggaatttacggaauttgc

SEQ ID NO: 434 - DNA, 34 bp, Artificial Sequence
  Description of Artificial Sequence: Synthetic primer
  Description of Combined DNA/RNA Molecule: Synthetic primer
ggtgtcgtggcctaaaaaacgcgaacgcccccgg

SEQ ID NO: 435 - DNA, 52 bp, Artificial Sequence
  Description of Artificial Sequence: Synthetic oligonucleotide
  Description of Combined DNA/RNA Molecule: Synthetic oligonucleotide
tcacgcacgtagggtctaaacttgaggaggagtttttttaggaaagcgttcg

SEQ ID NO: 436 - DNA, 54 bp, Artificial Sequence
  Description of Artificial Sequence: Synthetic oligonucleotide
gtttaagaagtcgaggttttttttggttacgcgtgttgtccggctgtggttaca

SEQ ID NO: 437 - DNA, 35 bp, Artificial Sequence
  Description of Artificial Sequence: Synthetic probe
atggaaagcgtttaagaagtcgaggttttttttgg

SEQ ID NO: 438 - DNA, 21 bp, Artificial Sequence
  Description of Artificial Sequence: Synthetic primer
tcacgcacgtagggtctaaac

SEQ ID NO: 439 - DNA, 20 bp, Artificial Sequence
  Description of Artificial Sequence: Synthetic primer
tgtaaccacagccggacaac

SEQ ID NO: 440 - DNA, 41 bp, Artificial Sequence
  Description of Artificial Sequence: Synthetic primer
  Description of Combined DNA/RNA Molecule: Synthetic primer
tgtaaccacagccggacaaccgcccccgaaaacgtguaact

SEQ ID NO: 441 - DNA, 32 bp, Artificial Sequence
  Description of Artificial Sequence: Synthetic primer
  Description of Combined DNA/RNA Molecule: Synthetic primer
gtttttaagttagtgtcgtttgttttcggttc

SEQ ID NO: 442 - DNA, 45 bp, Artificial Sequence
  Description of Artificial Sequence: Synthetic primer
  Description of Combined DNA/RNA Molecule: Synthetic primer
ggtgtcgtggatattaaccaaatttataattaacgcaacaacgtg

SEQ ID NO: 443 - DNA, 57 bp, Artificial Sequence
  Description of Artificial Sequence: Synthetic oligonucleotide
  Description of Combined DNA/RNA Molecule: Synthetic oligonucleotide
taacgggattgagagtggacatcggtttttatttattgatagtacggcgctcgagca

SEQ ID NO: 444 - DNA, 63 bp, Artificial Sequence
  Description of Artificial Sequence: Synthetic oligonucleotide
gagtgattttgtttagtttcgttttgcgtttttgtaaattacgttgtctgccgcccttactaa

SEQ ID NO: 445 - DNA, 31 bp, Artificial Sequence
  Description of Artificial Sequence: Synthetic probe
ttggcgctcgagtgattttgtttagtttcgt

SEQ ID NO: 446 - DNA, 21 bp, Artificial Sequence
  Description of Artificial Sequence: Synthetic primer
taacgggattgagagtggaca

SEQ ID NO: 447 - DNA, 19 bp, Artificial Sequence
  Description of Artificial Sequence: Synthetic primer
ttagtaagggcggcagaca

SEQ ID NO: 448 - DNA, 55 bp, Artificial Sequence
  Description of Artificial Sequence: Synthetic primer
  Description of Combined DNA/RNA Molecule: Synthetic primer
ttagtaagggcggcagacaaattaacgcaacaacgtaatttacaaaaatgcaaag

SEQ ID NO: 449 - DNA, 24 bp, Artificial Sequence
  Description of Artificial Sequence: Synthetic primer
  Description of Combined DNA/RNA Molecule: Synthetic primer
gcgggcggtataagagtagcgttt

SEQ ID NO: 450 - DNA, 32 bp, Artificial Sequence
  Description of Artificial Sequence: Synthetic primer
  Description of Combined DNA/RNA Molecule: Synthetic primer
ggtgtcgtggcgcccaaccaacttcgcactag

SEQ ID NO: 451 - DNA, 50 bp, Artificial Sequence
  Description of Artificial Sequence: Synthetic oligonucleotide
  Description of Combined DNA/RNA Molecule: Synthetic oligonucleotide
ttgaaggaggaaatcggcacagcggtataagagtagcgttcgatcgtcac

SEQ ID NO: 452 - DNA, 66 bp, Artificial Sequence
  Description of Artificial Sequence: Synthetic oligonucleotide
gtcgtttttagttaattcgggttttttttacggcgattaattagtgtcgaaccgttttaggactga

SEQ ID NO: 453 - DNA, 35 bp, Artificial Sequence
  Description of Artificial Sequence: Synthetic probe
tcttcgatcgtcgtttttagttaattcgggttttt

SEQ ID NO: 454 - DNA, 21 bp, Artificial Sequence
  Description of Artificial Sequence: Synthetic primer
ttgaaggaggaaatcggcaca

SEQ ID NO: 455 - DNA, 22 bp, Artificial Sequence
  Description of Artificial Sequence: Synthetic primer
tcagtcctaaaacggttcgaca

SEQ ID NO: 456 - DNA, 52 bp, Artificial Sequence
  Description of Artificial Sequence: Synthetic primer
  Description of Combined DNA/RNA Molecule: Synthetic primer
tcagtcctaaaacggttcgacaccaacttcgcactaattaatcgctguaaag

SEQ ID NO: 457 - DNA, 28 bp, Artificial Sequence
  Description of Artificial Sequence: Synthetic primer
  Description of Combined DNA/RNA Molecule: Synthetic primer
aggaatttatttgacgtcgagtcgggtg

SEQ ID NO: 458 - DNA, 30 bp, Artificial Sequence
  Description of Artificial Sequence: Synthetic primer
  Description of Combined DNA/RNA Molecule: Synthetic primer
ggtgtcgtggcgcgaacgcccgaaaaaaag

SEQ ID NO: 459 - DNA, 46 bp, Artificial Sequence
  Description of Artificial Sequence: Synthetic oligonucleotide
  Description of Combined DNA/RNA Molecule: Synthetic oligonucleotide
tacagatacggacgggaatcaacgtcgagtcgggtagcatcgagac

SEQ ID NO: 460 - DNA, 54 bp, Artificial Sequence
  Description of Artificial Sequence: Synthetic oligonucleotide
gaggttgttttttcgcgttgcgtattcgttcgttgtttacatcctcctgcgtca

SEQ ID NO: 461 - DNA, 29 bp, Artificial Sequence
  Description of Artificial Sequence: Synthetic probe
tttagcatcgaggttgttttttcgcgttg

SEQ ID NO: 462 - DNA, 22 bp, Artificial Sequence
  Description of Artificial Sequence: Synthetic primer
tacagatacggacgggaatcaa

SEQ ID NO: 463 - DNA, 22 bp, Artificial Sequence
  Description of Artificial Sequence: Synthetic primer
tgacgcaggaggatgtaaacaa

SEQ ID NO: 464 - DNA, 57 bp, Artificial Sequence
  Description of Artificial Sequence: Synthetic primer
  Description of Combined DNA/RNA Molecule: Synthetic primer
tgacgcaggaggatgtaaacaaaaaaaaatacgaaacgaacgaacgaatatgcaaca

SEQ ID NO: 465 - DNA, 29 bp, Artificial Sequence
  Description of Artificial Sequence: Synthetic primer
  Description of Combined DNA/RNA Molecule: Synthetic primer
ggaaaggttgcgtttagttttttcgttaa

SEQ ID NO: 466 - DNA, 40 bp, Artificial Sequence
  Description of Artificial Sequence: Synthetic primer
  Description of Combined DNA/RNA Molecule: Synthetic primer
ggtgtcgtggattaaaaacgaccgcgaaactataacgaat

SEQ ID NO: 467 - DNA, 54 bp, Artificial Sequence
  Description of Artificial Sequence: Synthetic oligonucleotide
  Description of Combined DNA/RNA Molecule: Synthetic oligonucleotide
tgaacgctcaaacacgtgaacggttgcgtttagttttttcgttagcatcgtcac

SEQ ID NO: 468 - DNA, 68 bp, Artificial Sequence
  Description of Artificial Sequence: Synthetic oligonucleotide
gtcgttattattatgtagttttttagtttgttttttttgggttgttcggttggcctgtaagcgttcca

SEQ ID NO: 469 - DNA, 45 bp, Artificial Sequence
  Description of Artificial Sequence: Synthetic probe
aatagcatcgtcgttattattatgtagttttttagtttgtttttt

SEQ ID NO: 470 - DNA, 21 bp, Artificial Sequence
  Description of Artificial Sequence: Synthetic primer
tgaacgctcaaacacgtgaac

SEQ ID NO: 471 - DNA, 20 bp, Artificial Sequence
  Description of Artificial Sequence: Synthetic primer
tggaacgcttacaggccaac

SEQ ID NO: 472 - DNA, 53 bp, Artificial Sequence
  Description of Artificial Sequence: Synthetic primer
  Description of Combined DNA/RNA Molecule: Synthetic primer
tggaacgcttacaggccaacattaaaaacgaccgcgaaactataaatgaacag

SEQ ID NO: 473 - DNA, 26 bp, Artificial Sequence
  Description of Artificial Sequence: Synthetic primer
  Description of Combined DNA/RNA Molecule: Synthetic primer
gggtgaaggcgtttagttgtcgagtg

SEQ ID NO: 474 - DNA, 34 bp, Artificial Sequence
  Description of Artificial Sequence: Synthetic primer
  Description of Combined DNA/RNA Molecule: Synthetic primer
ggtgtcgtggcaacccgcgctataacgaaataag

SEQ ID NO: 475 - DNA, 56 bp, Artificial Sequence
  Description of Artificial Sequence: Synthetic oligonucleotide
  Description of Combined DNA/RNA Molecule: Synthetic oligonucleotide
tgcgactctattcacgtccaaggtgaaggcgtttagttgtcgagtatactcgcggt

SEQ ID NO: 476 - DNA, 47 bp, Artificial Sequence
  Description of Artificial Sequence: Synthetic oligonucleotide
gcgacgcgggtttaaatttcgtcggtttgctatttggtgtaccgcca

SEQ ID NO: 477 - DNA, 30 bp, Artificial Sequence
  Description of Artificial Sequence: Synthetic probe
cctatactcgcgacgcgggtttaaatttcg

SEQ ID NO: 478 - DNA, 21 bp, Artificial Sequence
  Description of Artificial Sequence: Synthetic primer
tgcgactctattcacgtccaa

SEQ ID NO: 479 - DNA, 21 bp, Artificial Sequence
  Description of Artificial Sequence: Synthetic primer
tggcggtacaccaaatagcaa

SEQ ID NO: 480 - DNA, 59 bp, Artificial Sequence
  Description of Artificial Sequence: Synthetic primer
  Description of Combined DNA/RNA Molecule: Synthetic primer
tggcggtacaccaaatagcaagcgctataacgaaataaaaatacctaaaaactgacgag

SEQ ID NO: 481 - DNA, 28 bp, Artificial Sequence
  Description of Artificial Sequence: Synthetic primer
  Description of Combined DNA/RNA Molecule: Synthetic primer
ggtacgttcgttaggagtaggtagggta

SEQ ID NO: 482 - DNA, 35 bp, Artificial Sequence
  Description of Artificial Sequence: Synthetic primer
  Description of Combined DNA/RNA Molecule: Synthetic primer
ggtgtcgtggcctaccgctaaaactcgaccucctt

SEQ ID NO: 483 - DNA, 50 bp, Artificial Sequence
  Description of Artificial Sequence: Synthetic oligonucleotide
  Description of Combined DNA/RNA Molecule: Synthetic oligonucleotide
tgccctatcgaaaaggacaacaaggagtaggtagggtgttcgggcggtta

SEQ ID NO: 484 - DNA, 40 bp, Artificial Sequence
  Description of Artificial Sequence: Synthetic oligonucleotide
ggtcgtcggcggttgcgtgtgtttgcggctgtctatgaca

SEQ ID NO: 485 - DNA, 19 bp, Artificial Sequence
  Description of Artificial Sequence: Synthetic probe
cattcgggcggtcgtcggc

SEQ ID NO: 486 - DNA, 22 bp, Artificial Sequence
  Description of Artificial Sequence: Synthetic primer
tgccctatcgaaaaggacaaca

SEQ ID NO: 487 - DNA, 21 bp, Artificial Sequence
  Description of Artificial Sequence: Synthetic primer
tgtcatagacagccgcaaaca

SEQ ID NO: 488 - DNA, 51 bp, Artificial Sequence
  Description of Artificial Sequence: Synthetic primer
  Description of Combined DNA/RNA Molecule: Synthetic primer
tgtcatagacagccgcaaacacgacctcctctataacttcgacatgcaact

SEQ ID NO: 489 - DNA, 25 bp, Artificial Sequence
  Description of Artificial Sequence: Synthetic primer
  Description of Combined DNA/RNA Molecule: Synthetic primer
cgcgtatttttttcggggtcgattg

SEQ ID NO: 490 - DNA, 39 bp, Artificial Sequence
  Description of Artificial Sequence: Synthetic primer
  Description of Combined DNA/RNA Molecule: Synthetic primer
ggtgtcgtggaaacgaaaaaacgaaaaccctacccgaca

SEQ ID NO: 491 - DNA, 47 bp, Artificial Sequence
  Description of Artificial Sequence: Synthetic oligonucleotide
  Description of Combined DNA/RNA Molecule: Synthetic oligonucleotide
ttcttgcggttctggaacactcggggtcgattagttcggatcgttaa

SEQ ID NO: 492 - DNA, 70 bp, Artificial Sequence
  Description of Artificial Sequence: Synthetic oligonucleotide
gttggtatagttacgcgcgtttatatattattttcgtatttatacgtcggtgatgctccgttgttgctaa

SEQ ID NO: 493 - DNA, 28 bp, Artificial Sequence
  Description of Artificial Sequence: Synthetic probe
aatcggatcgttggtatagttacgcgcg

SEQ ID NO: 494 - DNA, 20 bp, Artificial Sequence
  Description of Artificial Sequence: Synthetic primer
ttcttgcggttctggaacac

SEQ ID NO: 495 - DNA, 21 bp, Artificial Sequence
  Description of Artificial Sequence: Synthetic primer
ttagcaacaacggagcatcac

SEQ ID NO: 496 - DNA, 54 bp, Artificial Sequence
  Description of Artificial Sequence: Synthetic primer
  Description of Combined DNA/RNA Molecule: Synthetic primer
ttagcaacaacggagcatcaccgaaaaccctacccgacgtataaatatgaaaac

SEQ ID NO: 497 - DNA, 19 bp, Artificial Sequence
  Description of Artificial Sequence: Synthetic primer
  Description of Combined DNA/RNA Molecule: Synthetic primer
gtagcggcggggtcggtgc

SEQ ID NO: 498 - DNA, 30 bp, Artificial Sequence
  Description of Artificial Sequence: Synthetic primer
  Description of Combined DNA/RNA Molecule: Synthetic primer
ggtgtcgtggcgtatccgcgctccgctcca

SEQ ID NO: 499 - DNA, 44 bp, Artificial Sequence
  Description of Artificial Sequence: Synthetic oligonucleotide
  Description of Combined DNA/RNA Molecule: Synthetic oligonucleotide
tgtgccttacggaaaacccagggtcggtgttcgggtaacgttgc

SEQ ID NO: 500 - DNA, 51 bp, Artificial Sequence
  Description of Artificial Sequence: Synthetic oligonucleotide
gttatcgcgcgttttagtgataatcggtcggttggagctagttcggcgaca

SEQ ID NO: 501 - DNA, 31 bp, Artificial Sequence
  Description of Artificial Sequence: Synthetic probe
aagggtaacgttatcgcgcgttttagtgata

SEQ ID NO: 502 - DNA, 20 bp, Artificial Sequence
  Description of Artificial Sequence: Synthetic primer
tgtgccttacggaaaaccca

SEQ ID NO: 503 - DNA, 19 bp, Artificial Sequence
  Description of Artificial Sequence: Synthetic primer
tgtcgccgaactagctcca

SEQ ID NO: 504 - DNA, 41 bp, Artificial Sequence
  Description of Artificial Sequence: Synthetic primer
  Description of Combined DNA/RNA Molecule: Synthetic primer
tgtcgccgaactagctccacgctccgacaccgactgattac

SEQ ID NO: 505 - DNA, 35 bp, Artificial Sequence
  Description of Artificial Sequence: Synthetic primer
  Description of Combined DNA/RNA Molecule: Synthetic primer
gttttaatttatagggcgattttaaaattcgataa

SEQ ID NO: 506 - DNA, 41 bp, Artificial Sequence
  Description of Artificial Sequence: Synthetic primer
  Description of Combined DNA/RNA Molecule: Synthetic primer
ggtgtcgtggcgaataaatctccgtctttcgaattcaaact

SEQ ID NO: 507 - DNA, 51 bp, Artificial Sequence
  Description of Artificial Sequence: Synthetic oligonucleotide
  Description of Combined DNA/RNA Molecule: Synthetic oligonucleotide
ttgcaaaccacccggacaaggcgattttaaaattcgatagcggcgcgtgaa

SEQ ID NO: 508 - DNA, 44 bp, Artificial Sequence
  Description of Artificial Sequence: Synthetic oligonucleotide
gtgggaatttgtggttcgcgaggcttggtcagcatcgactccta

SEQ ID NO: 509 - DNA, 22 bp, Artificial Sequence
  Description of Artificial Sequence: Synthetic probe
atgcggcgcgtgggaatttgtg

SEQ ID NO: 510 - DNA, 19 bp, Artificial Sequence
  Description of Artificial Sequence: Synthetic primer
ttgcaaaccacccggacaa

SEQ ID NO: 511 - DNA, 20 bp, Artificial Sequence
  Description of Artificial Sequence: Synthetic primer
taggagtcgatgctgaccaa

SEQ ID NO: 512 - DNA, 47 bp, Artificial Sequence
  Description of Artificial Sequence: Synthetic primer
  Description of Combined DNA/RNA Molecule: Synthetic primer
taggagtcgatgctgaccaagaattcaaacctacgcctcgtgaaccg

SEQ ID NO: 513 - DNA, 29 bp, Artificial Sequence
  Description of Artificial Sequence: Synthetic primer
  Description of Combined DNA/RNA Molecule: Synthetic primer
ttgaaagttttgagcggtgatttaggttc

SEQ ID NO: 514 - DNA, 35 bp, Artificial Sequence
  Description of Artificial Sequence: Synthetic primer
  Description of Combined DNA/RNA Molecule: Synthetic primer
ggtgtcgtgggctccgcaaactttctaaccuatat

SEQ ID NO: 515 - DNA, 53 bp, Artificial Sequence
  Description of Artificial Sequence: Synthetic oligonucleotide
  Description of Combined DNA/RNA Molecule: Synthetic oligonucleotide
ttcgcctaccgcagtgaacgtgatttaggttttttttttcggttcagcgaaac

SEQ ID NO: 516 - DNA, 50 bp, Artificial Sequence
  Description of Artificial Sequence: Synthetic oligonucleotide
gaagtagggaagaggagagaagtaggagtcggttgagacatgggctcgca

SEQ ID NO: 517 - DNA, 33 bp, Artificial Sequence
  Description of Artificial Sequence: Synthetic probe
ttgttcagcgaagtagggaagaggagagaagta

SEQ ID NO: 518 - DNA, 19 bp, Artificial Sequence
  Description of Artificial Sequence: Synthetic primer
ttcgcctaccgcagtgaac

SEQ ID NO: 519 - DNA, 19 bp, Artificial Sequence
  Description of Artificial Sequence: Synthetic primer
tgcgagcccatgtctcaac

SEQ ID NO: 520 - DNA, 54 bp, Artificial Sequence
  Description of Artificial Sequence: Synthetic primer
  Description of Combined DNA/RNA Molecule: Synthetic primer
tgcgagcccatgtctcaaccgcaaactttctaacctatacaatctcctgactct

SEQ ID NO: 521 - DNA, 28 bp, Artificial Sequence
  Description of Artificial Sequence: Synthetic primer
  Description of Combined DNA/RNA Molecule: Synthetic primer
gaaagatggtattattgggaggcgggca

SEQ ID NO: 522 - DNA, 40 bp, Artificial Sequence
  Description of Artificial Sequence: Synthetic primer
  Description of Combined DNA/RNA Molecule: Synthetic primer
ggtgtcgtgggactcaactaaaacgctacaaaacccaaat

SEQ ID NO: 523 - DNA, 53 bp, Artificial Sequence
  Description of Artificial Sequence: Synthetic oligonucleotide
  Description of Combined DNA/RNA Molecule: Synthetic oligonucleotide
ttgcatttcgttagcgacacacgggcgtcggttatattttgagttctcgggag

SEQ ID NO: 524 - DNA, 41 bp, Artificial Sequence
  Description of Artificial Sequence: Synthetic oligonucleotide
gaggaggaggtagcgttcgcgtgtgagtcgatctacccgca

SEQ ID NO: 525 - DNA, 28 bp, Artificial Sequence
  Description of Artificial Sequence: Synthetic probe
ccagttctcgaggaggaggtagcgttcg

SEQ ID NO: 526 - DNA, 21 bp, Artificial Sequence
  Description of Artificial Sequence: Synthetic primer
ttgcatttcgttagcgacaca

SEQ ID NO: 527 - DNA, 20 bp, Artificial Sequence
  Description of Artificial Sequence: Synthetic primer
tgcgggtagatcgactcaca

SEQ ID NO: 528 - DNA, 47 bp, Artificial Sequence
  Description of Artificial Sequence: Synthetic primer
  Description of Combined DNA/RNA Molecule: Synthetic primer
tgcgggtagatcgactcacaacgctacaaaacccaaaccatgcgaat

SEQ ID NO: 529 - DNA, 24 bp, Artificial Sequence
  Description of Artificial Sequence: Synthetic primer
  Description of Combined DNA/RNA Molecule: Synthetic primer
gaagggtcgagttgggttaggaca

SEQ ID NO: 530 - DNA, 33 bp, Artificial Sequence
  Description of Artificial Sequence: Synthetic primer
  Description of Combined DNA/RNA Molecule: Synthetic primer
ggtgtcgtgggccgcttccaataaccacuaacg

SEQ ID NO: 531 - DNA, 52 bp, Artificial Sequence
  Description of Artificial Sequence: Synthetic oligonucleotide
  Description of Combined DNA/RNA Molecule: Synthetic oligonucleotide
taacgggattgagagtggacaggtcgagttgggttaggacgattctcgagcg

SEQ ID NO: 532 - DNA, 52 bp, Artificial Sequence
  Description of Artificial Sequence: Synthetic oligonucleotide
gagtagagttttcggttcggatgttcgttagggtgtctgccgcccttactaa

SEQ ID NO: 533 - DNA, 35 bp, Artificial Sequence
  Description of Artificial Sequence: Synthetic probe
ttgattctcgagtagagttttcggttcggatgttc

SEQ ID NO: 534 - DNA, 21 bp, Artificial Sequence
  Description of Artificial Sequence: Synthetic primer
taacgggattgagagtggaca

SEQ ID NO: 535 - DNA, 19 bp, Artificial Sequence
  Description of Artificial Sequence: Synthetic primer
ttagtaagggcggcagaca

SEQ ID NO: 536 - DNA, 52 bp, Artificial Sequence
  Description of Artificial Sequence: Synthetic primer
  Description of Combined DNA/RNA Molecule: Synthetic primer
ttagtaagggcggcagacacttccaataaccactaacatccctaatgaacac

SEQ ID NO: 537 - DNA, 26 bp, Artificial Sequence
  Description of Artificial Sequence: Synthetic primer
  Description of Combined DNA/RNA Molecule: Synthetic primer
gggttaattcgaagaggttgcgaggc

SEQ ID NO: 538 - DNA, 40 bp, Artificial Sequence
  Description of Artificial Sequence: Synthetic primer
  Description of Combined DNA/RNA Molecule: Synthetic primer
ggtgtcgtggccttaataatcccgtccatttaaccaaatt

SEQ ID NO: 539 - DNA, 49 bp, Artificial Sequence
  Description of Artificial Sequence: Synthetic oligonucleotide
  Description of Combined DNA/RNA Molecule: Synthetic oligonucleotide
ttcgtgcgtcgtgtagcaagaggttgcgaggttaggttgtagtcgggcc

SEQ ID NO: 540 - DNA, 51 bp, Artificial Sequence
  Description of Artificial Sequence: Synthetic oligonucleotide
gggttaatgtgtggaatattgggaggttcggttgcccattttctgcaccca

SEQ ID NO: 541 - DNA, 33 bp, Artificial Sequence
  Description of Artificial Sequence: Synthetic probe
aatgtagtcgggttaatgtgtggaatattggga

SEQ ID NO: 542 - DNA, 19 bp, Artificial Sequence
  Description of Artificial Sequence: Synthetic primer
ttcgtgcgtcgtgtagcaa

SEQ ID NO: 543 - DNA, 20 bp, Artificial Sequence
  Description of Artificial Sequence: Synthetic primer
tgggtgcagaaaatgggcaa

SEQ ID NO: 544 - DNA, 52 bp, Artificial Sequence
  Description of Artificial Sequence: Synthetic primer
  Description of Combined DNA/RNA Molecule: Synthetic primer
tgggtgcagaaaatgggcaaccgtccatttaaccaaatctacaactgaacct

SEQ ID NO: 545 - DNA, 24 bp, Artificial Sequence
  Description of Artificial Sequence: Synthetic primer
  Description of Combined DNA/RNA Molecule: Synthetic primer
gtttagttcggcgacgttcggttg

SEQ ID NO: 546 - DNA, 33 bp, Artificial Sequence
  Description of Artificial Sequence: Synthetic primer
  Description of Combined DNA/RNA Molecule: Synthetic primer
ggtgtcgtggaaacaccgactcgactccgaacg

SEQ ID NO: 547 - DNA, 48 bp, Artificial Sequence
  Description of Artificial Sequence: Synthetic oligonucleotide
  Description of Combined DNA/RNA Molecule: Synthetic oligonucleotide
tccaaacgattaggagcgtcaaacgttcggttaggttcggcgcggtcc

SEQ ID NO: 548 - DNA, 41 bp, Artificial Sequence
  Description of Artificial Sequence: Synthetic oligonucleotide
ggtttgggcgcgaggttcggttggacagaggtatacgccca

SEQ ID NO: 549 - DNA, 19 bp, Artificial Sequence
  Description of Artificial Sequence: Synthetic probe
aatcggcgcggtttgggcg

SEQ ID NO: 550 - DNA, 22 bp, Artificial Sequence
  Description of Artificial Sequence: Synthetic primer
tccaaacgattaggagcgtcaa

SEQ ID NO: 551 - DNA, 21 bp, Artificial Sequence
  Description of Artificial Sequence: Synthetic primer
tgggcgtatacctctgtccaa

SEQ ID NO: 552 - DNA, 44 bp, Artificial Sequence
  Description of Artificial Sequence: Synthetic primer
  Description of Combined DNA/RNA Molecule: Synthetic primer
tgggcgtatacctctgtccaacgactccgaacaccgctgactct

SEQ ID NO: 553 - DNA, 27 bp, Artificial Sequence
  Description of Artificial Sequence: Synthetic primer
  Description of Combined DNA/RNA Molecule: Synthetic primer
gaagggtagtttcgggtagtacggatc

SEQ ID NO: 554 - DNA, 38 bp, Artificial Sequence
  Description of Artificial Sequence: Synthetic primer
  Description of Combined DNA/RNA Molecule: Synthetic primer
ggtgtcgtggcgactttaacgctaacatatcccuctct

SEQ ID NO: 555 - DNA, 60 bp, Artificial Sequence
  Description of Artificial Sequence: Synthetic oligonucleotide
  Description of Combined DNA/RNA Molecule: Synthetic oligonucleotide
tgatgctggcaaaccctagaacgggtagtacggattagatattgttatgaaggacgttcc

SEQ ID NO: 556 - DNA, 52 bp, Artificial Sequence
  Description of Artificial Sequence: Synthetic oligonucleotide
gttttcgataagggaaggttagggtaggtggggttccatcaccgttaggcca

SEQ ID NO: 557 - DNA, 33 bp, Artificial Sequence
  Description of Artificial Sequence: Synthetic probe
ccgaaggacgttttcgataagggaaggttaggg

SEQ ID NO: 558 - DNA, 22 bp, Artificial Sequence
  Description of Artificial Sequence: Synthetic primer
tgatgctggcaaaccctagaac

SEQ ID NO: 559 - DNA, 20 bp, Artificial Sequence
  Description of Artificial Sequence: Synthetic primer
tggcctaacggtgatggaac

SEQ ID NO: 560 - DNA, 48 bp, Artificial Sequence
  Description of Artificial Sequence: Synthetic primer
  Description of Combined DNA/RNA Molecule: Synthetic primer
tggcctaacggtgatggaaccgctaacatatccctctccccgcctcct

SEQ ID NO: 561 - DNA, 24 bp, Artificial Sequence
  Description of Artificial Sequence: Synthetic primer
  Description of Combined DNA/RNA Molecule: Synthetic primer
gggttggttttcgtcgagauttta

SEQ ID NO: 562 - DNA, 31 bp, Artificial Sequence
  Description of Artificial Sequence: Synthetic primer
  Description of Combined DNA/RNA Molecule: Synthetic primer
ggtgtcgtgggcgacaacgaaacgcaucact

SEQ ID NO: 563 - DNA, 50 bp, Artificial Sequence
  Description of Artificial Sequence: Synthetic oligonucleotide
  Description of Combined DNA/RNA Molecule: Synthetic oligonucleotide
ttcgctgcccggttaaacagttttcgtcgagattttgttgggcgcgggcc

SEQ ID NO: 564 - DNA, 55 bp, Artificial Sequence
  Description of Artificial Sequence: Synthetic oligonucleotide
gggttttggttttacggtgagttcggttttagttgttatcggacctagctcgaca

SEQ ID NO: 565 - DNA, 24 bp, Artificial Sequence
  Description of Artificial Sequence: Synthetic probe
aatgggcgcgggttttggttttac

SEQ ID NO: 566 - DNA, 19 bp, Artificial Sequence
  Description of Artificial Sequence: Synthetic primer
ttcgctgcccggttaaaca

SEQ ID NO: 567 - DNA, 22 bp, Artificial Sequence
  Description of Artificial Sequence: Synthetic primer
tgtcgagctaggtccgataaca

SEQ ID NO: 568 - DNA, 51 bp, Artificial Sequence
  Description of Artificial Sequence: Synthetic primer
  Description of Combined DNA/RNA Molecule: Synthetic primer
tgtcgagctaggtccgataacaaacgcatcaccgaaactaaaactgaactt

SEQ ID NO: 569 - DNA, 26 bp, Artificial Sequence
  Description of Artificial Sequence: Synthetic primer
  Description of Combined DNA/RNA Molecule: Synthetic primer
ttagagtaggagtcggtgtgagttga

SEQ ID NO: 570 - DNA, 40 bp, Artificial Sequence
  Description of Artificial Sequence: Synthetic primer
  Description of Combined DNA/RNA Molecule: Synthetic primer
ggtgtcgtggcgacttcgaacctactctctaattcuatat

SEQ ID NO: 571 - DNA, 46 bp, Artificial Sequence
  Description of Artificial Sequence: Synthetic oligonucleotide
  Description of Combined DNA/RNA Molecule: Synthetic oligonucleotide
tcacagagacttgccgatcacggtgtgagttgggaggatgcgggcc

SEQ ID NO: 572 - DNA, 58 bp, Artificial Sequence
  Description of Artificial Sequence: Synthetic oligonucleotide
gggttgtagacgtgatcggcgatagatagattatcggtgtgtagcttagacatggcca

SEQ ID NO: 573 - DNA, 27 bp, Artificial Sequence
  Description of Artificial Sequence: Synthetic probe
ttaggatgcgggttgtagacgtgatcg

SEQ ID NO: 574 - DNA, 21 bp, Artificial Sequence
  Description of Artificial Sequence: Synthetic primer
tcacagagacttgccgatcac

SEQ ID NO: 575 - DNA, 22 bp, Artificial Sequence
  Description of Artificial Sequence: Synthetic primer
tggccatgtctaagctacacac

SEQ ID NO: 576 - DNA, 60 bp, Artificial Sequence
  Description of Artificial Sequence: Synthetic primer
  Description of Combined DNA/RNA Molecule: Synthetic primer
tggccatgtctaagctacacacaattctatacatccgataatctatctatcgctgatcat

SEQ ID NO: 577 - DNA, 21 bp, Artificial Sequence
  Description of Artificial Sequence: Synthetic primer
  Description of Combined DNA/RNA Molecule: Synthetic primer
tcggggagcggttgtagggca

SEQ ID NO: 578 - DNA, 41 bp, Artificial Sequence
  Description of Artificial Sequence: Synthetic primer
  Description of Combined DNA/RNA Molecule: Synthetic primer
ggtgtcgtggcaaacgaaaaactcttttactcctcccaaag

SEQ ID NO: 579 - DNA, 43 bp, Artificial Sequence
  Description of Artificial Sequence: Synthetic oligonucleotide
  Description of Combined DNA/RNA Molecule: Synthetic oligonucleotide
tcgacgaatctgctcagacaaggttgtagggcggcagcggcaa

SEQ ID NO: 580 - DNA, 52 bp, Artificial Sequence
  Description of Artificial Sequence: Synthetic oligonucleotide
ggcggtcgggttattagaagtatagtggagtcgttgaagcagcgtctgagca

SEQ ID NO: 581 - DNA, 17 bp, Artificial Sequence
  Description of Artificial Sequence: Synthetic probe
ttcggcagcggcggtcg

SEQ ID NO: 582 - DNA, 21 bp, Artificial Sequence
  Description of Artificial Sequence: Synthetic primer
tcgacgaatctgctcagacaa

SEQ ID NO: 583 - DNA, 19 bp, Artificial Sequence
  Description of Artificial Sequence: Synthetic primer
tgctcagacgctgcttcaa

SEQ ID NO: 584 - DNA, 53 bp, Artificial Sequence
  Description of Artificial Sequence: Synthetic primer
  Description of Combined DNA/RNA Molecule: Synthetic primer
tgctcagacgctgcttcaactcttttactcctcccaaaacaaaaaatgactct

SEQ ID NO: 585 - DNA, 31 bp, Artificial Sequence
  Description of Artificial Sequence: Synthetic primer
  Description of Combined DNA/RNA Molecule: Synthetic primer
cgcgattcgttttttgtattttattcgttga

SEQ ID NO: 586 - DNA, 40 bp, Artificial Sequence
  Description of Artificial Sequence: Synthetic primer
  Description of Combined DNA/RNA Molecule: Synthetic primer
ggtgtcgtggaatcgtaacactcacgataactaacgcgca

SEQ ID NO: 587 - DNA, 62 bp, Artificial Sequence
  Description of Artificial Sequence: Synthetic oligonucleotide
  Description of Combined DNA/RNA Molecule: Synthetic oligonucleotide
tcgatggtcaatgagcttcacatgtattttattcgttggtttttatttttcggaaacgttta

SEQ ID NO: 588 - DNA, 64 bp, Artificial Sequence
  Description of Artificial Sequence: Synthetic oligonucleotide
gttcgttcgatagtatagtatttgtcgtttagttacgttcgctgttacgtgatctccctctcca

SEQ ID NO: 589 - DNA, 41 bp, Artificial Sequence
  Description of Artificial Sequence: Synthetic probe
aacggaaacgttcgttcgatagtatagtatttgtcgtttag

SEQ ID NO: 590 - DNA, 22 bp, Artificial Sequence
  Description of Artificial Sequence: Synthetic primer
tcgatggtcaatgagcttcaca

SEQ ID NO: 591 - DNA, 22 bp, Artificial Sequence
  Description of Artificial Sequence: Synthetic primer
tggagagggagatcacgtaaca

SEQ ID NO: 592 - DNA, 50 bp, Artificial Sequence
  Description of Artificial Sequence: Synthetic primer
  Description of Combined DNA/RNA Molecule: Synthetic primer
tggagagggagatcacgtaacatcacgataactaacgcgcgaatguaacc

SEQ ID NO: 593 - DNA, 23 bp, Artificial Sequence
  Description of Artificial Sequence: Synthetic primer
  Description of Combined DNA/RNA Molecule: Synthetic primer
gcgggagtgtgtgtgtaagggac

SEQ ID NO: 594 - DNA, 39 bp, Artificial Sequence
  Description of Artificial Sequence: Synthetic primer
  Description of Combined DNA/RNA Molecule: Synthetic primer
ggtgtcgtggcaactaaattataaaaccgcgtccgaaag

SEQ ID NO: 595 - DNA, 45 bp, Artificial Sequence
  Description of Artificial Sequence: Synthetic oligonucleotide
  Description of Combined DNA/RNA Molecule: Synthetic oligonucleotide
tacgaatcacccgagagttcaagggttaggaggcggaatcggaag

SEQ ID NO: 596 - DNA, 46 bp, Artificial Sequence
  Description of Artificial Sequence: Synthetic oligonucleotide
ggagaaagggttggaggtgttcgtttgtgggtgggtataggtcaga

SEQ ID NO: 597 - DNA, 27 bp, Artificial Sequence
  Description of Artificial Sequence: Synthetic probe
ttcggaatcggagaaagggttggaggt

SEQ ID NO: 598 - DNA, 22 bp, Artificial Sequence
  Description of Artificial Sequence: Synthetic primer
tacgaatcacccgagagttcaa

SEQ ID NO: 599 - DNA, 22 bp, Artificial Sequence
  Description of Artificial Sequence: Synthetic primer
tctgacctatacccacccacaa

SEQ ID NO: 600 - DNA, 50 bp, Artificial Sequence
  Description of Artificial Sequence: Synthetic primer
  Description of Combined DNA/RNA Molecule: Synthetic primer
tctgacctatacccacccacaacgtccgaaaaaacgctaaacatgaacat

SEQ ID NO: 601 - DNA, 25 bp, Artificial Sequence
  Description of Artificial Sequence: Synthetic primer
  Description of Combined DNA/RNA Molecule: Synthetic primer
gtttcgcgtcgcgtttattcgtttc

SEQ ID NO: 602 - DNA, 34 bp, Artificial Sequence
  Description of Artificial Sequence: Synthetic primer
  Description of Combined DNA/RNA Molecule: Synthetic primer
ggtgtcgtggccgaaacgacgaccgaaacuacag

SEQ ID NO: 603 - DNA, 54 bp, Artificial Sequence
  Description of Artificial Sequence: Synthetic oligonucleotide
  Description of Combined DNA/RNA Molecule: Synthetic oligonucleotide
tccggcctttgacgataccgcgtcgcgtttattcgtttttaggattcacggtgt

SEQ ID NO: 604 - DNA, 60 bp, Artificial Sequence
  Description of Artificial Sequence: Synthetic oligonucleotide
ggtacgttttcgcgtcgttattttgttattttttgtcgggtaattcactcgaacggagca

SEQ ID NO: 605 - DNA, 27 bp, Artificial Sequence
  Description of Artificial Sequence: Synthetic probe
ttgattcacggtacgttttcgcgtcgt

SEQ ID NO: 606 - DNA, 19 bp, Artificial Sequence
  Description of Artificial Sequence: Synthetic primer
tccggcctttgacgatacc

SEQ ID NO: 607 - DNA, 22 bp, Artificial Sequence
  Description of Artificial Sequence: Synthetic primer
tgctccgttcgagtgaattacc

SEQ ID NO: 608 - DNA, 50 bp, Artificial Sequence
  Description of Artificial Sequence: Synthetic primer
  Description of Combined DNA/RNA Molecule: Synthetic primer
tgctccgttcgagtgaattacccgaccgaaactacaaaaccgatgacaag

SEQ ID NO: 609 - DNA, 28 bp, Artificial Sequence
  Description of Artificial Sequence: Synthetic primer
  Description of Combined DNA/RNA Molecule: Synthetic primer
gttagtatggagcgaaagagttcggtta

SEQ ID NO: 610 - DNA, 32 bp, Artificial Sequence
  Description of Artificial Sequence: Synthetic primer
  Description of Combined DNA/RNA Molecule: Synthetic primer
ggtgtcgtggcctaactacgaccgcgcgaaat

SEQ ID NO: 611 - DNA, 54 bp, Artificial Sequence
  Description of Artificial Sequence: Synthetic oligonucleotide
  Description of Combined DNA/RNA Molecule: Synthetic oligonucleotide
tagccgatggcgtaaaaccgcgaaagagttcggttgttatttcgtaatcgttta

SEQ ID NO: 612 - DNA, 43 bp, Artificial Sequence
  Description of Artificial Sequence: Synthetic oligonucleotide
gttcgcgcggaaggtttcgtcgtggtcgtatgacttgctcgca

SEQ ID NO: 613 - DNA, 27 bp, Artificial Sequence
  Description of Artificial Sequence: Synthetic probe
aacgtaatcgttcgcgcggaaggtttc

SEQ ID NO: 614 - DNA, 19 bp, Artificial Sequence
  Description of Artificial Sequence: Synthetic primer
tagccgatggcgtaaaacc

SEQ ID NO: 615 - DNA, 20 bp, Artificial Sequence
  Description of Artificial Sequence: Synthetic primer
tgcgagcaagtcatacgacc

SEQ ID NO: 616 - DNA, 43 bp, Artificial Sequence
  Description of Artificial Sequence: Synthetic primer
  Description of Combined DNA/RNA Molecule: Synthetic primer
tgcgagcaagtcatacgaccaccgcgcgaaaccgattgcccag

SEQ ID NO: 617 - DNA, 28 bp, Artificial Sequence
  Description of Artificial Sequence: Synthetic primer
  Description of Combined DNA/RNA Molecule: Synthetic primer
tttcgtagggttgtaatcgtttcgggac

SEQ ID NO: 618 - DNA, 39 bp, Artificial Sequence
  Description of Artificial Sequence: Synthetic primer
  Description of Combined DNA/RNA Molecule: Synthetic primer
ggtgtcgtggattacctaaaccgacgaaactaaaaaact

SEQ ID NO: 619 - DNA, 42 bp, Artificial Sequence
  Description of Artificial Sequence: Synthetic oligonucleotide
  Description of Combined DNA/RNA Molecule: Synthetic oligonucleotide
ttgctgtgcgcggtagaaccgtttcgaggtgaggatcgggtc

SEQ ID NO: 620 - DNA, 49 bp, Artificial Sequence
  Description of Artificial Sequence: Synthetic oligonucleotide
gggataggtatcgcgggcgtaatttgagtgttacgctaagctggtgcca

SEQ ID NO: 621 - DNA, 26 bp, Artificial Sequence
  Description of Artificial Sequence: Synthetic probe
aagaggatcgggataggtatcgcggg

SEQ ID NO: 622 - DNA, 19 bp, Artificial Sequence
  Description of Artificial Sequence: Synthetic primer
ttgctgtgcgcggtagaac

SEQ ID NO: 623 - DNA, 20 bp, Artificial Sequence
  Description of Artificial Sequence: Synthetic primer
tggcaccagcttagcgtaac

SEQ ID NO: 624 - DNA, 50 bp, Artificial Sequence
  Description of Artificial Sequence: Synthetic primer
  Description of Combined DNA/RNA Molecule: Synthetic primer
tggcaccagcttagcgtaacgacgaaactaaaaaaccgctacgtguaaat

SEQ ID NO: 625 - DNA, 25 bp, Artificial Sequence
  Description of Artificial Sequence: Synthetic primer
  Description of Combined DNA/RNA Molecule: Synthetic primer
cgtttcggttgcggttattagtgtg

SEQ ID NO: 626 - DNA, 31 bp, Artificial Sequence
  Description of Artificial Sequence: Synthetic primer
  Description of Combined DNA/RNA Molecule: Synthetic primer
ggtgtcgtgggccgccctcctctaaaaaaag

SEQ ID NO: 627 - DNA, 53 bp, Artificial Sequence
  Description of Artificial Sequence: Synthetic oligonucleotide
  Description of Combined DNA/RNA Molecule: Synthetic oligonucleotide
ttgcagcgggtcacaacaattgcggttattagtgtagggatgtgtctcggtct

SEQ ID NO: 628 - DNA, 57 bp, Artificial Sequence
  Description of Artificial Sequence: Synthetic oligonucleotide
ggttcgtttttattgaaatgcggcgtttcgtatagtttggacagaggtatacgccca

SEQ ID NO: 629 - DNA, 32 bp, Artificial Sequence
  Description of Artificial Sequence: Synthetic probe
ccgtgtctcggttcgtttttattgaaatgcgg

SEQ ID NO: 630 - DNA, 19 bp, Artificial Sequence
  Description of Artificial Sequence: Synthetic primer
ttgcagcgggtcacaacaa

SEQ ID NO: 631 - DNA, 21 bp, Artificial Sequence
  Description of Artificial Sequence: Synthetic primer
tgggcgtatacctctgtccaa

SEQ ID NO: 632 - DNA, 65 bp, Artificial Sequence
  Description of Artificial Sequence: Synthetic primer
  Description of Combined DNA/RNA Molecule: Synthetic primer
tgggcgtatacctctgtccaagccctcctctaaaaaaaaaaactaaaataaaactatatgaaaca

SEQ ID NO: 633 - DNA, 43 bp, Artificial Sequence
  Description of Artificial Sequence: Synthetic primer
  Description of Combined DNA/RNA Molecule: Synthetic primer
gtaaattcgttaaattatgatataataaggttaatttcgaggg

SEQ ID NO: 634 - DNA, 45 bp, Artificial Sequence
  Description of Artificial Sequence: Synthetic primer
  Description of Combined DNA/RNA Molecule: Synthetic primer
ggtgtcgtgggcaacattattacgtaactctaaaactaacccaac

SEQ ID NO: 635 - DNA, 69 bp, Artificial Sequence
  Description of Artificial Sequence: Synthetic oligonucleotide
  Description of Combined DNA/RNA Molecule: Synthetic oligonucleotide
tcttacgcccagggaatgtaactcgttaaattatgatataataaggttaatttcgaggattctcggtaa

SEQ ID NO: 636 - DNA, 67 bp, Artificial Sequence
  Description of Artificial Sequence: Synthetic oligonucleotide
ggtggattattagcgtatttttttataattagaaagtgaaaaattgggttgtccggctgtggttaca

SEQ ID NO: 637 - DNA, 46 bp, Artificial Sequence
  Description of Artificial Sequence: Synthetic probe
ttgattctcggtggattattagcgtatttttttataattagaaagt

SEQ ID NO: 638 - DNA, 22 bp, Artificial Sequence
  Description of Artificial Sequence: Synthetic primer
tcttacgcccagggaatgtaac

SEQ ID NO: 639 - DNA, 20 bp, Artificial Sequence
  Description of Artificial Sequence: Synthetic primer
tgtaaccacagccggacaac

SEQ ID NO: 640 - DNA, 23 bp, Artificial Sequence
  Description of Artificial Sequence: Synthetic primer
  Description of Combined DNA/RNA Molecule: Synthetic primer
gggagcgttttgtttggcgataa

SEQ ID NO: 641 - DNA, 33 bp, Artificial Sequence
  Description of Artificial Sequence: Synthetic primer
  Description of Combined DNA/RNA Molecule: Synthetic primer
ggtgtcgtggccgccgacccttaaaacccccat

SEQ ID NO: 642 - DNA, 47 bp, Artificial Sequence
  Description of Artificial Sequence: Synthetic oligonucleotide
  Description of Combined DNA/RNA Molecule: Synthetic oligonucleotide
tatagtcacgcaggaccacatgtttggcgatagtcggaaagcgcgga

SEQ ID NO: 643 - DNA, 50 bp, Artificial Sequence
  Description of Artificial Sequence: Synthetic oligonucleotide
gcgagaggagaggttttttcgttgaatagtgtttgcggctgtctatgaca

SEQ ID NO: 644 - DNA, 26 bp, Artificial Sequence
  Description of Artificial Sequence: Synthetic probe
aaggaaagcgcgagaggagaggtttt

SEQ ID NO: 645 - DNA, 20 bp, Artificial Sequence
  Description of Artificial Sequence: Synthetic primer
tatagtcacgcaggaccaca

SEQ ID NO: 646 - DNA, 21 bp, Artificial Sequence
  Description of Artificial Sequence: Synthetic primer
tgtcatagacagccgcaaaca

SEQ ID NO: 647 - DNA, 52 bp, Artificial Sequence
  Description of Artificial Sequence: Synthetic primer
  Description of Combined DNA/RNA Molecule: Synthetic primer
tgtcatagacagccgcaaacaacccttaaaacccccactattcaatgaaaag

SEQ ID NO: 648 - DNA, 28 bp, Artificial Sequence
  Description of Artificial Sequence: Synthetic primer
  Description of Combined DNA/RNA Molecule: Synthetic primer
gtcgttaaggtttagacgttttcgtgtg

SEQ ID NO: 649 - DNA, 45 bp, Artificial Sequence
  Description of Artificial Sequence: Synthetic primer
  Description of Combined DNA/RNA Molecule: Synthetic primer
ggtgtcgtggcgaccattttaacttctctaaaatatattcaccgg

SEQ ID NO: 650 - DNA, 53 bp, Artificial Sequence
  Description of Artificial Sequence: Synthetic oligonucleotide
  Description of Combined DNA/RNA Molecule: Synthetic oligonucleotide
ttcaacgatcgcgcagacacgtgtaggagggacgacgatttttttcacgttcc

SEQ ID NO: 651 - DNA, 63 bp, Artificial Sequence
  Description of Artificial Sequence: Synthetic oligonucleotide
gttttcgtggttttaattcggcgttttgttatttttgattctgttctgggaattattgccgga

SEQ ID NO: 652 - DNA, 32 bp, Artificial Sequence
  Description of Artificial Sequence: Synthetic probe
ccttttcacgttttcgtggttttaattcggcg

SEQ ID NO: 653 - DNA, 19 bp, Artificial Sequence
  Description of Artificial Sequence: Synthetic primer
ttcaacgatcgcgcagaca

SEQ ID NO: 654 - DNA, 22 bp, Artificial Sequence
  Description of Artificial Sequence: Synthetic primer
tccggcaataattcccagaaca

SEQ ID NO: 655 - DNA, 61 bp, Artificial Sequence
  Description of Artificial Sequence: Synthetic primer
  Description of Combined DNA/RNA Molecule: Synthetic primer
tccggcaataattcccagaacacgaccattttaacttctctaaaatatattcactgaatcg

SEQ ID NO: 656 - DNA, 27 bp, Artificial Sequence
  Description of Artificial Sequence: Synthetic primer
  Description of Combined DNA/RNA Molecule: Synthetic primer
ggttgttgggtttcggatttacggtgc

SEQ ID NO: 657 - DNA, 32 bp, Artificial Sequence
  Description of Artificial Sequence: Synthetic primer
  Description of Combined DNA/RNA Molecule: Synthetic primer
ggtgtcgtggccgccgtataacgcctcuaatg

SEQ ID NO: 658 - DNA, 64 bp, Artificial Sequence
  Description of Artificial Sequence: Synthetic oligonucleotide
  Description of Combined DNA/RNA Molecule: Synthetic oligonucleotide
tggataaactaagtccgcccacgtgtttttttttttttattgtttcgtggttttgagtcgttgc

SEQ ID NO: 659 - DNA, 63 bp, Artificial Sequence
  Description of Artificial Sequence: Synthetic oligonucleotide
gttatttgtttattattcgggcgttcgttatttattaggcgtgtgactgagcgacgtctaaca

SEQ ID NO: 660 - DNA, 36 bp, Artificial Sequence
  Description of Artificial Sequence: Synthetic probe
ccttgagtcgttatttgtttattattcgggcgttcg

SEQ ID NO: 661 - DNA, 22 bp, Artificial Sequence
  Description of Artificial Sequence: Synthetic primer
tggataaactaagtccgcccac

SEQ ID NO: 662 - DNA, 21 bp, Artificial Sequence
  Description of Artificial Sequence: Synthetic primer
tgttagacgtcgctcagtcac

SEQ ID NO: 663 - DNA, 52 bp, Artificial Sequence
  Description of Artificial Sequence: Synthetic primer
  Description of Combined DNA/RNA Molecule: Synthetic primer
tgttagacgtcgctcagtcaccgccgtataacgcctctaatacaatgcctag

SEQ ID NO: 664 - DNA, 28 bp, Artificial Sequence
  Description of Artificial Sequence: Synthetic primer
  Description of Combined DNA/RNA Molecule: Synthetic primer
ttattttaggttcgattttcggcgttta

SEQ ID NO: 665 - DNA, 35 bp, Artificial Sequence
  Description of Artificial Sequence: Synthetic primer
  Description of Combined DNA/RNA Molecule: Synthetic primer
ggtgtcgtggtaatacccgacaacaacgccccctt

SEQ ID NO: 666 - DNA, 49 bp, Artificial Sequence
  Description of Artificial Sequence: Synthetic oligonucleotide
  Description of Combined DNA/RNA Molecule: Synthetic oligonucleotide
tactatcgtatcacgccgacaggttcgattttcggcgtttgggcgttgg

SEQ ID NO: 667 - DNA, 68 bp, Artificial Sequence
  Description of Artificial Sequence: Synthetic oligonucleotide
gttaatttcgttaagaacgtttttaattttaggttattttgtagcgtagtgtaacgtccgtgggctaa

SEQ ID NO: 668 - DNA, 41 bp, Artificial Sequence
  Description of Artificial Sequence: Synthetic probe
aatttgggcgttaatttcgttaagaacgtttttaattttag

SEQ ID NO: 669 - DNA, 21 bp, Artificial Sequence
  Description of Artificial Sequence: Synthetic primer
tactatcgtatcacgccgaca

SEQ ID NO: 670 - DNA, 19 bp, Artificial Sequence
  Description of Artificial Sequence: Synthetic primer
ttagcccacggacgttaca

SEQ ID NO: 671 - DNA, 44 bp, Artificial Sequence
  Description of Artificial Sequence: Synthetic primer
  Description of Combined DNA/RNA Molecule: Synthetic primer
ttagcccacggacgttacaacaacaacgccccctctatgctacg

SEQ ID NO: 672 - DNA, 28 bp, Artificial Sequence
  Description of Artificial Sequence: Synthetic primer
  Description of Combined DNA/RNA Molecule: Synthetic primer
gggagaatttattagggattggggggtc

SEQ ID NO: 673 - DNA, 30 bp, Artificial Sequence
  Description of Artificial Sequence: Synthetic primer
  Description of Combined DNA/RNA Molecule: Synthetic primer
ggtgtcgtggtcaccccgcccctaactccc

SEQ ID NO: 674 - DNA, 54 bp, Artificial Sequence
  Description of Artificial Sequence: Synthetic oligonucleotide
  Description of Combined DNA/RNA Molecule: Synthetic oligonucleotide
tgctatgccgcattcaaccaggagaatttattagggattgggaggtcgcgttcc

SEQ ID NO: 675 - DNA, 69 bp, Artificial Sequence
  Description of Artificial Sequence: Synthetic oligonucleotide
gtttttacgattcgatttttttagtgtatagtatttttaagggagaggagtggagctagttcggcgaca

SEQ ID NO: 676 - DNA, 35 bp, Artificial Sequence
  Description of Artificial Sequence: Synthetic probe
ttgggtcgcgtttttacgattcgatttttttagtg

SEQ ID NO: 677 - DNA, 20 bp, Artificial Sequence
  Description of Artificial Sequence: Synthetic primer
tgctatgccgcattcaacca

SEQ ID NO: 678 - DNA, 19 bp, Artificial Sequence
  Description of Artificial Sequence: Synthetic primer
tgtcgccgaactagctcca

SEQ ID NO: 679 - DNA, 19 bp, Artificial Sequence
  Description of Artificial Sequence: Synthetic primer
  Description of Combined DNA/RNA Molecule: Synthetic primer
ggcggtcgcggttcggcgc

SEQ ID NO: 680 - DNA, 37 bp, Artificial Sequence
  Description of Artificial Sequence: Synthetic primer
  Description of Combined DNA/RNA Molecule: Synthetic primer
ggtgtcgtggcgaaaaacgcgactaaacaacccgaca

SEQ ID NO: 681 - DNA, 43 bp, Artificial Sequence
  Description of Artificial Sequence: Synthetic oligonucleotide
  Description of Combined DNA/RNA Molecule: Synthetic oligonucleotide
tggaggccggagaaattaaacgtcgcggttcggcgctcgcgcc

SEQ ID NO: 682 - DNA, 61 bp, Artificial Sequence
  Description of Artificial Sequence: Synthetic oligonucleotide
gcgtttattttggttggttcgtttatatttattttcgcgtgtttgggatctgggcatcaca

SEQ ID NO: 683 - DNA, 26 bp, Artificial Sequence
  Description of Artificial Sequence: Synthetic probe
aaggcgctcgcgtttattttggttgg

SEQ ID NO: 684 - DNA, 21 bp, Artificial Sequence
  Description of Artificial Sequence: Synthetic primer
tggaggccggagaaattaaac

SEQ ID NO: 685 - DNA, 21 bp, Artificial Sequence
  Description of Artificial Sequence: Synthetic primer
tgtgatgcccagatcccaaac

SEQ ID NO: 686 - DNA, 54 bp, Artificial Sequence
  Description of Artificial Sequence: Synthetic primer
  Description of Combined DNA/RNA Molecule: Synthetic primer
tgtgatgcccagatcccaaaccaacccgacgcgaaaataaatataaatgaaccg

SEQ ID NO: 687 - DNA, 25 bp, Artificial Sequence
  Description of Artificial Sequence: Synthetic primer
  Description of Combined DNA/RNA Molecule: Synthetic primer
ttcgtagcgcgtcgtatttcgaggc

SEQ ID NO: 688 - DNA, 38 bp, Artificial Sequence
  Description of Artificial Sequence: Synthetic primer
  Description of Combined DNA/RNA Molecule: Synthetic primer
ggtgtcgtggcgaccgaaactaaaaccgaaaacgccag

SEQ ID NO: 689 - DNA, 52 bp, Artificial Sequence
  Description of Artificial Sequence: Synthetic oligonucleotide
  Description of Combined DNA/RNA Molecule: Synthetic oligonucleotide
tagtttgtcgaaagtcccacaccgtcgtatttcgaggttcgggtctcgtacg

SEQ ID NO: 690 - DNA, 61 bp, Artificial Sequence
  Description of Artificial Sequence: Synthetic oligonucleotide
gtatagttgtagtcggtgtttttcggttaagttttcgtttgtgcaaaattcaggctgtgca

SEQ ID NO: 691 - DNA, 34 bp, Artificial Sequence
  Description of Artificial Sequence: Synthetic probe
aagggtctcgtatagttgtagtcggtgtttttcg

SEQ ID NO: 692 - DNA, 22 bp, Artificial Sequence
  Description of Artificial Sequence: Synthetic primer
tagtttgtcgaaagtcccacac

SEQ ID NO: 693 - DNA, 21 bp, Artificial Sequence
  Description of Artificial Sequence: Synthetic primer
tgcacagcctgaattttgcac

SEQ ID NO: 694 - DNA, 52 bp, Artificial Sequence
  Description of Artificial Sequence: Synthetic primer
  Description of Combined DNA/RNA Molecule: Synthetic primer
tgcacagcctgaattttgcacgaaactaaaaccgaaaacgccaaatgaaaat

SEQ ID NO: 695 - DNA, 20 bp, Artificial Sequence
  Description of Artificial Sequence: Synthetic primer
  Description of Combined DNA/RNA Molecule: Synthetic primer
cgcgtcggtgtcgtcgttgc

SEQ ID NO: 696 - DNA, 31 bp, Artificial Sequence
  Description of Artificial Sequence: Synthetic primer
  Description of Combined DNA/RNA Molecule: Synthetic primer
ggtgtcgtgggaccccgaaacccgacaaaag

SEQ ID NO: 697 - DNA, 54 bp, Artificial Sequence
  Description of Artificial Sequence: Synthetic oligonucleotide
  Description of Combined DNA/RNA Molecule: Synthetic oligonucleotide
taccactcatcttctgcgacatcgtcgttgttagtggagttgttttctcgttcc

SEQ ID NO: 698 - DNA, 62 bp, Artificial Sequence
  Description of Artificial Sequence: Synthetic oligonucleotide
gtttttttagggtggttcggttttattaaatatgtcggtttttgtgagtcgatctacccgca

SEQ ID NO: 699 - DNA, 43 bp, Artificial Sequence
  Description of Artificial Sequence: Synthetic probe
ccttttctcgtttttttagggtggttcggttttattaaatatg

SEQ ID NO: 700 - DNA, 21 bp, Artificial Sequence
  Description of Artificial Sequence: Synthetic primer
taccactcatcttctgcgaca

SEQ ID NO: 701 - DNA, 20 bp, Artificial Sequence
  Description of Artificial Sequence: Synthetic primer
tgcgggtagatcgactcaca

SEQ ID NO: 702 - DNA, 46 bp, Artificial Sequence
  Description of Artificial Sequence: Synthetic primer
  Description of Combined DNA/RNA Molecule: Synthetic primer
tgcgggtagatcgactcacacccgaaacccgacaaaaactgacatg

SEQ ID NO: 703 - DNA, 27 bp, Artificial Sequence
  Description of Artificial Sequence: Synthetic primer
  Description of Combined DNA/RNA Molecule: Synthetic primer
cgtgcgtagggtttttttagtcgtcgc

SEQ ID NO: 704 - DNA, 31 bp, Artificial Sequence
  Description of Artificial Sequence: Synthetic primer
  Description of Combined DNA/RNA Molecule: Synthetic primer
ggtgtcgtggcgacgctccgaaaccccgacg

SEQ ID NO: 705 - DNA, 61 bp, Artificial Sequence
  Description of Artificial Sequence: Synthetic oligonucleotide
  Description of Combined DNA/RNA Molecule: Synthetic oligonucleotide
tcctgagggacaaatacacaccttttttagtcgtcgttttaagggttttattaggcgtacc

SEQ ID NO: 706 - DNA, 76 bp, Artificial Sequence
  Description of Artificial Sequence: Synthetic oligonucleotide
gtattaagagttagtttaagttggatcgtaattatagttttcgttatattttgtcggtaggtaaggaagtcacgca

SEQ ID NO: 707 - DNA, 46 bp, Artificial Sequence
  Description of Artificial Sequence: Synthetic probe
ccattaggcgtattaagagttagtttaagttggatcgtaattatag

SEQ ID NO: 708 - DNA, 22 bp, Artificial Sequence
  Description of Artificial Sequence: Synthetic primer
tcctgagggacaaatacacacc

SEQ ID NO: 709 - DNA, 21 bp, Artificial Sequence
  Description of Artificial Sequence: Synthetic primer
tgcgtgacttccttacctacc

SEQ ID NO: 710 - DNA, 52 bp, Artificial Sequence
  Description of Artificial Sequence: Synthetic primer
  Description of Combined DNA/RNA Molecule: Synthetic primer
tgcgtgacttccttacctaccctccgaaaccccgacaaaatataatgaaaat

SEQ ID NO: 711 - DNA, 25 bp, Artificial Sequence
  Description of Artificial Sequence: Synthetic primer
  Description of Combined DNA/RNA Molecule: Synthetic primer
gatcgttcgttgtgtttcgcgttgt

SEQ ID NO: 712 - DNA, 35 bp, Artificial Sequence
  Description of Artificial Sequence: Synthetic primer
  Description of Combined DNA/RNA Molecule: Synthetic primer
ggtgtcgtggcgacctcgaacttcctaaccuaaac

SEQ ID NO: 713 - DNA, 49 bp, Artificial Sequence
  Description of Artificial Sequence: Synthetic oligonucleotide
  Description of Combined DNA/RNA Molecule: Synthetic oligonucleotide
ttgttcgcccgttggtcacttgtgtttcgcgttgcgtttttctcgttcc

SEQ ID NO: 714 - DNA, 56 bp, Artificial Sequence
  Description of Artificial Sequence: Synthetic oligonucleotide
gtttttttttcgcgtaggtttttttgtgttagtcggtgtggagcgctaaggttgca

SEQ ID NO: 715 - DNA, 36 bp, Artificial Sequence
  Description of Artificial Sequence: Synthetic probe
ccttttctcgtttttttttcgcgtaggtttttttgt

SEQ ID NO: 716 - DNA, 19 bp, Artificial Sequence
  Description of Artificial Sequence: Synthetic primer
ttgttcgcccgttggtcac

SEQ ID NO: 717 - DNA, 19 bp, Artificial Sequence
  Description of Artificial Sequence: Synthetic primer
tgcaaccttagcgctccac

SEQ ID NO: 718 - DNA, 51 bp, Artificial Sequence
  Description of Artificial Sequence: Synthetic primer
  Description of Combined DNA/RNA Molecule: Synthetic primer
tgcaaccttagcgctccacgaacttcctaacctaaatcgacaactgactag

SEQ ID NO: 719 - DNA, 21 bp, Artificial Sequence
  Description of Artificial Sequence: Synthetic primer
  Description of Combined DNA/RNA Molecule: Synthetic primer
gcggcggatttggaacgatac

SEQ ID NO: 720 - DNA, 38 bp, Artificial Sequence
  Description of Artificial Sequence: Synthetic primer
  Description of Combined DNA/RNA Molecule: Synthetic primer
ggtgtcgtgggaccaaaaaaactcacaacttccccctt

SEQ ID NO: 721 - DNA, 57 bp, Artificial Sequence
  Description of Artificial Sequence: Synthetic oligonucleotide
  Description of Combined DNA/RNA Molecule: Synthetic oligonucleotide
taggaacacggaggacatcaacggcggatttggaacgatattatttattcgcgttaa

SEQ ID NO: 722 - DNA, 51 bp, Artificial Sequence
  Description of Artificial Sequence: Synthetic oligonucleotide
gttgggcgtttttttaagggatgggaggattgtgggtgggtataggtcaga

SEQ ID NO: 723 - DNA, 29 bp, Artificial Sequence
  Description of Artificial Sequence: Synthetic probe
cctattcgcgttgggcgtttttttaaggg

SEQ ID NO: 724 - DNA, 21 bp, Artificial Sequence
  Description of Artificial Sequence: Synthetic primer
taggaacacggaggacatcaa

SEQ ID NO: 725 - DNA, 22 bp, Artificial Sequence
  Description of Artificial Sequence: Synthetic primer
tctgacctatacccacccacaa

SEQ ID NO: 726 - DNA, 24 bp, Artificial Sequence
  Description of Artificial Sequence: Synthetic primer
  Description of Combined DNA/RNA Molecule: Synthetic primer
atatgcgtagtttttattttgcgc

SEQ ID NO: 727 - DNA, 38 bp, Artificial Sequence
  Description of Artificial Sequence: Synthetic primer
  Description of Combined DNA/RNA Molecule: Synthetic primer
ggtgtcgtggtacactcccaataaaacgcgtaaaaaat

SEQ ID NO: 728 - DNA, 62 bp, Artificial Sequence
  Description of Artificial Sequence: Synthetic oligonucleotide
  Description of Combined DNA/RNA Molecule: Synthetic oligonucleotide
ttcggcaggctacggtacagtagtttttattttgcgcgtagttttatgtatagtctcggata

SEQ ID NO: 729 - DNA, 63 bp, Artificial Sequence
  Description of Artificial Sequence: Synthetic oligonucleotide
ggacgggtttttagttttattggcgtagaatttattatcgttgtcgaaccgttttaggactga

SEQ ID NO: 730 - DNA, 33 bp, Artificial Sequence
  Description of Artificial Sequence: Synthetic probe
cctagtctcggacgggtttttagttttattggc

SEQ ID NO: 731 - DNA, 19 bp, Artificial Sequence
  Description of Artificial Sequence: Synthetic primer
ttcggcaggctacggtaca

SEQ ID NO: 732 - DNA, 22 bp, Artificial Sequence
  Description of Artificial Sequence: Synthetic primer
tcagtcctaaaacggttcgaca

SEQ ID NO: 733 - DNA, 55 bp, Artificial Sequence
  Description of Artificial Sequence: Synthetic primer
  Description of Combined DNA/RNA Molecule: Synthetic primer
tcagtcctaaaacggttcgacatcccaataaaacgcgtaaaaaacaaatgataac

SEQ ID NO: 734 - DNA, 21 bp, Artificial Sequence
  Description of Artificial Sequence: Synthetic primer
  Description of Combined DNA/RNA Molecule: Synthetic primer
ggagggatggttcggcgtttc

SEQ ID NO: 735 - DNA, 34 bp, Artificial Sequence
  Description of Artificial Sequence: Synthetic primer
  Description of Combined DNA/RNA Molecule: Synthetic primer
ggtgtcgtggacccgaatattcatcccgcgcgcg

SEQ ID NO: 736 - DNA, 49 bp, Artificial Sequence
  Description of Artificial Sequence: Synthetic oligonucleotide
  Description of Combined DNA/RNA Molecule: Synthetic oligonucleotide
taaacaatgagacccgctgaacgggatggttcggcgttttaagcgttca

SEQ ID NO: 737 - DNA, 72 bp, Artificial Sequence
  Description of Artificial Sequence: Synthetic oligonucleotide
gtttgttatagatttatttgcgggtcgtttttatttagtattttagaaatgttgtcgcataggcagttcata

SEQ ID NO: 738 - DNA, 36 bp, Artificial Sequence
  Description of Artificial Sequence: Synthetic probe
cctttaagcgtttgttatagatttatttgcgggtcg

SEQ ID NO: 739 - DNA, 22 bp, Artificial Sequence
  Description of Artificial Sequence: Synthetic primer
taaacaatgagacccgctgaac

SEQ ID NO: 740 - DNA, 22 bp, Artificial Sequence
  Description of Artificial Sequence: Synthetic primer
tatgaactgcctatgcgacaac

SEQ ID NO: 741 - DNA, 47 bp, Artificial Sequence
  Description of Artificial Sequence: Synthetic primer
  Description of Combined DNA/RNA Molecule: Synthetic primer
tatgaactgcctatgcgacaacccgaatattcatcccgcgtgcaatc

SEQ ID NO: 742 - DNA, 36 bp, Artificial Sequence
  Description of Artificial Sequence: Synthetic primer
  Description of Combined DNA/RNA Molecule: Synthetic primer
cgtttaggtaaaaaataggaatagtatatgcgtagg

SEQ ID NO: 743 - DNA, 40 bp, Artificial Sequence
  Description of Artificial Sequence: Synthetic primer
  Description of Combined DNA/RNA Molecule: Synthetic primer
ggtgtcgtggcgacgccttctaaaaactataatccgaaag

SEQ ID NO: 744 - DNA, 65 bp, Artificial Sequence
  Description of Artificial Sequence: Synthetic oligonucleotide
  Description of Combined DNA/RNA Molecule: Synthetic oligonucleotide
taagacgtatgctagcgccaaggtaaaaaataggaatagtatatgcgtagaaaggttctcgggct

SEQ ID NO: 745 - DNA, 48 bp, Artificial Sequence
  Description of Artificial Sequence: Synthetic oligonucleotide
gggtcgtttttttcgaggttttttcgggttggtcagcatcgactccta

SEQ ID NO: 746 - DNA, 34 bp, Artificial Sequence
  Description of Artificial Sequence: Synthetic probe
ttggttctcgggtcgtttttttcgaggttttttc

SEQ ID NO: 747 - DNA, 21 bp, Artificial Sequence
  Description of Artificial Sequence: Synthetic primer
taagacgtatgctagcgccaa

SEQ ID NO: 748 - DNA, 20 bp, Artificial Sequence
  Description of Artificial Sequence: Synthetic primer
taggagtcgatgctgaccaa

SEQ ID NO: 749 - DNA, 57 bp, Artificial Sequence
  Description of Artificial Sequence: Synthetic primer
  Description of Combined DNA/RNA Molecule: Synthetic primer
taggagtcgatgctgaccaaccttctaaaaactataatccgaaaaaccgatgaaaag

SEQ ID NO: 750 - DNA, 31 bp, Artificial Sequence
  Description of Artificial Sequence: Synthetic primer
  Description of Combined DNA/RNA Molecule: Synthetic primer
attgagttttgatacgtaggattagcgttac

SEQ ID NO: 751 - DNA, 41 bp, Artificial Sequence
  Description of Artificial Sequence: Synthetic primer
  Description of Combined DNA/RNA Molecule: Synthetic primer
ggtgtcgtggcaataaaaataacccaaacaaactccccaag

SEQ ID NO: 752 - DNA, 63 bp, Artificial Sequence
  Description of Artificial Sequence: Synthetic oligonucleotide
  Description of Combined DNA/RNA Molecule: Synthetic oligonucleotide
tttccgccgctacaaccaatgatacgtaggattagcgttattaatagatttgtttctcggtcc

SEQ ID NO: 753 - DNA, 65 bp, Artificial Sequence
  Description of Artificial Sequence: Synthetic oligonucleotide
ggtttagttttttttagggtttttgttggaaatcgattttatttggttgaagcagcgtctgagca

SEQ ID NO: 754 - DNA, 40 bp, Artificial Sequence
  Description of Artificial Sequence: Synthetic probe
ccgtttctcggtttagttttttttagggtttttgttggaa

SEQ ID NO: 755 - DNA, 19 bp, Artificial Sequence
  Description of Artificial Sequence: Synthetic primer
tttccgccgctacaaccaa

SEQ ID NO: 756 - DNA, 19 bp, Artificial Sequence
  Description of Artificial Sequence: Synthetic primer
tgctcagacgctgcttcaa

SEQ ID NO: 757 - DNA, 51 bp, Artificial Sequence
  Description of Artificial Sequence: Synthetic primer
  Description of Combined DNA/RNA Molecule: Synthetic primer
tgctcagacgctgcttcaacccaaacaaactccccaaataaaattgatttt

SEQ ID NO: 758 - DNA, 29 bp, Artificial Sequence
  Description of Artificial Sequence: Synthetic primer
  Description of Combined DNA/RNA Molecule: Synthetic primer
ggttttgcgatttttaggtaagacgtagc

SEQ ID NO: 759 - DNA, 42 bp, Artificial Sequence
  Description of Artificial Sequence: Synthetic primer
  Description of Combined DNA/RNA Molecule: Synthetic primer
ggtgtcgtggaaacgataacgaaaaaaacaaaaaaaaacttg

SEQ ID NO: 760 - DNA, 55 bp, Artificial Sequence
  Description of Artificial Sequence: Synthetic oligonucleotide
  Description of Combined DNA/RNA Molecule: Synthetic oligonucleotide
tagcattcgagaacgcaccagacgtagtttaggaggttttttttcgaatcgcgcc

SEQ ID NO: 761 - DNA, 65 bp, Artificial Sequence
  Description of Artificial Sequence: Synthetic oligonucleotide
gcgtttcggattacgtcgtaatgtttcgttattttagtaataagggtgctagtcacacagttcca

SEQ ID NO: 762 - DNA, 29 bp, Artificial Sequence
  Description of Artificial Sequence: Synthetic probe
aatcgaatcgcgtttcggattacgtcgta

SEQ ID NO: 763 - DNA, 19 bp, Artificial Sequence
  Description of Artificial Sequence: Synthetic primer
tagcattcgagaacgcacc

SEQ ID NO: 764 - DNA, 21 bp, Artificial Sequence
  Description of Artificial Sequence: Synthetic primer
tggaactgtgtgactagcacc

SEQ ID NO: 765 - DNA, 68 bp, Artificial Sequence
  Description of Artificial Sequence: Synthetic primer
  Description of Combined DNA/RNA Molecule: Synthetic primer
tggaactgtgtgactagcaccgataacgaaaaaaacaaaaaaaaacttattactaaaataatgaaacg

SEQ ID NO: 766 - DNA, 40 bp, Artificial Sequence
  Description of Artificial Sequence: Synthetic primer
  Description of Combined DNA/RNA Molecule: Synthetic primer
gtaagttttagataagggatttttaattatagataaaaga

SEQ ID NO: 767 - DNA, 32 bp, Artificial Sequence
  Description of Artificial Sequence: Synthetic primer
  Description of Combined DNA/RNA Molecule: Synthetic primer
ggtgtcgtggcaccccccaacgttctauttct

SEQ ID NO: 768 - DNA, 71 bp, Artificial Sequence
  Description of Artificial Sequence: Synthetic oligonucleotide
  Description of Combined DNA/RNA Molecule: Synthetic oligonucleotide
ttcgtccctgcacgctaacgttttagataagggatttttaattatagataaaaggtaaataaagtcgtacg

SEQ ID NO: 769 - DNA, 65 bp, Artificial Sequence
  Description of Artificial Sequence: Synthetic oligonucleotide
gtatattatattttttacgtgttagttgacggtcgcgataaaagggttccatcaccgttaggcca

SEQ ID NO: 770 - DNA, 44 bp, Artificial Sequence
  Description of Artificial Sequence: Synthetic probe
cctaaagtcgtatattatattttttacgtgttagttgacggtcg

SEQ ID NO: 771 - DNA, 19 bp, Artificial Sequence
  Description of Artificial Sequence: Synthetic primer
ttcgtccctgcacgctaac

SEQ ID NO: 772 - DNA, 20 bp, Artificial Sequence
  Description of Artificial Sequence: Synthetic primer
tggcctaacggtgatggaac

SEQ ID NO: 773 - DNA, 52 bp, Artificial Sequence
  Description of Artificial Sequence: Synthetic primer
  Description of Combined DNA/RNA Molecule: Synthetic primer
tggcctaacggtgatggaaccccccaacgttctatttccttttattgcgact

SEQ ID NO: 774 - DNA, 29 bp, Artificial Sequence
  Description of Artificial Sequence: Synthetic primer
  Description of Combined DNA/RNA Molecule: Synthetic primer
ttacgtttttttttcggttcgttagttgc

SEQ ID NO: 775 - DNA, 32 bp, Artificial Sequence
  Description of Artificial Sequence: Synthetic primer
  Description of Combined DNA/RNA Molecule: Synthetic primer
ggtgtcgtggccctcaaccgccgaatcuccca

SEQ ID NO: 776 - DNA, 52 bp, Artificial Sequence
  Description of Artificial Sequence: Synthetic oligonucleotide
  Description of Combined DNA/RNA Molecule: Synthetic oligonucleotide
ttggtacgaggagggcacatttttcggttcgttagttgttttttagcgttac

SEQ ID NO: 777 - DNA, 54 bp, Artificial Sequence
  Description of Artificial Sequence: Synthetic oligonucleotide
gttgtttttagatttgttgcgtttcgatttggaggtgtctgccgcccttactaa

SEQ ID NO: 778 - DNA, 36 bp, Artificial Sequence
  Description of Artificial Sequence: Synthetic probe
ccttttagcgttgtttttagatttgttgcgtttcga

SEQ ID NO: 779 - DNA, 19 bp, Artificial Sequence
  Description of Artificial Sequence: Synthetic primer
ttggtacgaggagggcaca

SEQ ID NO: 780 - DNA, 19 bp, Artificial Sequence
  Description of Artificial Sequence: Synthetic primer
ttagtaagggcggcagaca

SEQ ID NO: 781 - DNA, 43 bp, Artificial Sequence
  Description of Artificial Sequence: Synthetic primer
  Description of Combined DNA/RNA Molecule: Synthetic primer
ttagtaagggcggcagacatcaaccgccgaatctcctgaaccg

SEQ ID NO: 782 - DNA, 21 bp, Artificial Sequence
  Description of Artificial Sequence: Synthetic primer
  Description of Combined DNA/RNA Molecule: Synthetic primer
ttcgggtttgggtcgcggttc

SEQ ID NO: 783 - DNA, 36 bp, Artificial Sequence
  Description of Artificial Sequence: Synthetic primer
  Description of Combined DNA/RNA Molecule: Synthetic primer
ggtgtcgtggcaatctcaaaacccgacaaccgccca

SEQ ID NO: 784 - DNA, 52 bp, Artificial Sequence
  Description of Artificial Sequence: Synthetic oligonucleotide
  Description of Combined DNA/RNA Molecule: Synthetic oligonucleotide
tctcaatgtcgagccgtaccggtttgggtcgcggttttttttttctcggcac

SEQ ID NO: 785 - DNA, 52 bp, Artificial Sequence
  Description of Artificial Sequence: Synthetic oligonucleotide
ggcgtttcgttttgagcggagtaataattagaaggttcttcggctggctcaa

SEQ ID NO: 786 - DNA, 28 bp, Artificial Sequence
  Description of Artificial Sequence: Synthetic probe
ccttttctcggcgtttcgttttgagcgg

SEQ ID NO: 787 - DNA, 20 bp, Artificial Sequence
  Description of Artificial Sequence: Synthetic primer
tctcaatgtcgagccgtacc

SEQ ID NO: 788 - DNA, 19 bp, Artificial Sequence
  Description of Artificial Sequence: Synthetic primer
ttgagccagccgaagaacc

SEQ ID NO: 789 - DNA, 39 bp, Artificial Sequence
  Description of Artificial Sequence: Synthetic primer
  Description of Combined DNA/RNA Molecule: Synthetic primer
ttgagccagccgaagaacccccgacaaccgcctgaaatc

SEQ ID NO: 790 - DNA, 29 bp, Artificial Sequence
  Description of Artificial Sequence: Synthetic primer
  Description of Combined DNA/RNA Molecule: Synthetic primer
ggagatgtagatttcgatgttttcggcgc

SEQ ID NO: 791 - DNA, 31 bp, Artificial Sequence
  Description of Artificial Sequence: Synthetic primer
  Description of Combined DNA/RNA Molecule: Synthetic primer
ggtgtcgtggaaaacccgcaaacgccuaatg

SEQ ID NO: 792 - DNA, 48 bp, Artificial Sequence
  Description of Artificial Sequence: Synthetic oligonucleotide
  Description of Combined DNA/RNA Molecule: Synthetic oligonucleotide
tcccttagagagaacgcccagttttcggtggtcgagttttagcggata

SEQ ID NO: 793 - DNA, 38 bp, Artificial Sequence
  Description of Artificial Sequence: Synthetic oligonucleotide
ggacggacgcggcgcgtggtgacgtacgagtgttctta

SEQ ID NO: 794 - DNA, 22 bp, Artificial Sequence
  Description of Artificial Sequence: Synthetic probe
ccttttagcggacggacgcggc

SEQ ID NO: 795 - DNA, 20 bp, Artificial Sequence
  Description of Artificial Sequence: Synthetic primer
tcccttagagagaacgccca

SEQ ID NO: 796 - DNA, 22 bp, Artificial Sequence
  Description of Artificial Sequence: Synthetic primer
taagaacactcgtacgtcacca

SEQ ID NO: 797 - DNA, 48 bp, Artificial Sequence
  Description of Artificial Sequence: Synthetic primer
  Description of Combined DNA/RNA Molecule: Synthetic primer
taagaacactcgtacgtcaccacccgcaaacgcctaataactgccaag

SEQ ID NO: 798 - DNA, 25 bp, Artificial Sequence
  Description of Artificial Sequence: Synthetic primer
  Description of Combined DNA/RNA Molecule: Synthetic primer
tcgggagggttcgattttacggatc

SEQ ID NO: 799 - DNA, 32 bp, Artificial Sequence
  Description of Artificial Sequence: Synthetic primer
  Description of Combined DNA/RNA Molecule: Synthetic primer
ggtgtcgtggcgaaaaacgcgccttccgcgag

SEQ ID NO: 800 - DNA, 54 bp, Artificial Sequence
  Description of Artificial Sequence: Synthetic oligonucleotide
  Description of Combined DNA/RNA Molecule: Synthetic oligonucleotide
tctcataccagacgcggtaacggagggttcgattttacggatttagatcgttac

SEQ ID NO: 801 - DNA, 59 bp, Artificial Sequence
  Description of Artificial Sequence: Synthetic oligonucleotide
gttgtggtttatcgttttcgatttgatttggtttttgtcggttcgtgtcgctgtgctta

SEQ ID NO: 802 - DNA, 39 bp, Artificial Sequence
  Description of Artificial Sequence: Synthetic probe
ccttagatcgttgtggtttatcgttttcgatttgatttg

SEQ ID NO: 803 - DNA, 21 bp, Artificial Sequence
  Description of Artificial Sequence: Synthetic primer
tctcataccagacgcggtaac

SEQ ID NO: 804 - DNA, 19 bp, Artificial Sequence
  Description of Artificial Sequence: Synthetic primer
taagcacagcgacacgaac

SEQ ID NO: 805 - DNA, 42 bp, Artificial Sequence
  Description of Artificial Sequence: Synthetic primer
  Description of Combined DNA/RNA Molecule: Synthetic primer
taagcacagcgacacgaaccgccttccgcgaataatgacaag

SEQ ID NO: 806 - DNA, 21 bp, Artificial Sequence
  Description of Artificial Sequence: Synthetic primer
  Description of Combined DNA/RNA Molecule: Synthetic primer
agttgcgggtcgggtagtgac

SEQ ID NO: 807 - DNA, 44 bp, Artificial Sequence
  Description of Artificial Sequence: Synthetic primer
  Description of Combined DNA/RNA Molecule: Synthetic primer
ggtgtcgtggctctaaaataaaatacgcaataaacaaccaaaca

SEQ ID NO: 808 - DNA, 49 bp, Artificial Sequence
  Description of Artificial Sequence: Synthetic oligonucleotide
  Description of Combined DNA/RNA Molecule: Synthetic oligonucleotide
ttttcggcggcagctaaaccgggtcgggtagtgattgatagatcgggcg

SEQ ID NO: 809 - DNA, 54 bp, Artificial Sequence
  Description of Artificial Sequence: Synthetic oligonucleotide
gggaatagggtttttcgtttttttttcgtttgggtgttcgtgtcgctgtgctta

SEQ ID NO: 810 - DNA, 37 bp, Artificial Sequence
  Description of Artificial Sequence: Synthetic probe
ccatagatcgggaatagggtttttcgtttttttttcg

SEQ ID NO: 811 - DNA, 19 bp, Artificial Sequence
  Description of Artificial Sequence: Synthetic primer
ttttcggcggcagctaaac

SEQ ID NO: 812 - DNA, 19 bp, Artificial Sequence
  Description of Artificial Sequence: Synthetic primer
taagcacagcgacacgaac

SEQ ID NO: 813 - DNA, 58 bp, Artificial Sequence
  Description of Artificial Sequence: Synthetic primer
  Description of Combined DNA/RNA Molecule: Synthetic primer
taagcacagcgacacgaacctctaaaataaaatacgcaataaacaaccaaatgcccct

SEQ ID NO: 814 - DNA, 30 bp, Artificial Sequence
  Description of Artificial Sequence: Synthetic primer
  Description of Combined DNA/RNA Molecule: Synthetic primer
tttttcgttcgattttttttttcgcgtttc

SEQ ID NO: 815 - DNA, 42 bp, Artificial Sequence
  Description of Artificial Sequence: Synthetic primer
  Description of Combined DNA/RNA Molecule: Synthetic primer
ggtgtcgtggacataaaaatacaaatactcccgtcaauatag

SEQ ID NO: 816 - DNA, 62 bp, Artificial Sequence
  Description of Artificial Sequence: Synthetic oligonucleotide
  Description of Combined DNA/RNA Molecule: Synthetic oligonucleotide
tgatgctggcaaaccctagaactcgattttttttttcgcgttttatgtttttttctcgatcc

SEQ ID NO: 817 - DNA, 52 bp, Artificial Sequence
  Description of Artificial Sequence: Synthetic oligonucleotide
gattttcggtgttgcggaagaattgaaggttggttccatcaccgttaggcca

SEQ ID NO: 818 - DNA, 29 bp, Artificial Sequence
  Description of Artificial Sequence: Synthetic probe
ccttttctcgattttcggtgttgcggaag

SEQ ID NO: 819 - DNA, 22 bp, Artificial Sequence
  Description of Artificial Sequence: Synthetic primer
tgatgctggcaaaccctagaac

SEQ ID NO: 820 - DNA, 20 bp, Artificial Sequence
  Description of Artificial Sequence: Synthetic primer
tggcctaacggtgatggaac

SEQ ID NO: 821 - DNA, 53 bp, Artificial Sequence
  Description of Artificial Sequence: Synthetic primer
  Description of Combined DNA/RNA Molecule: Synthetic primer
tggcctaacggtgatggaaccaaatactcccgtcaaaataaaacattgcaact

SEQ ID NO: 822 - DNA, 31 bp, Artificial Sequence
  Description of Artificial Sequence: Synthetic primer
  Description of Combined DNA/RNA Molecule: Synthetic primer
aaattcgttcggtttatttaagtttcgttgc

SEQ ID NO: 823 - DNA, 38 bp, Artificial Sequence
  Description of Artificial Sequence: Synthetic primer
  Description of Combined DNA/RNA Molecule: Synthetic primer
ggtgtcgtggcctttaacttcctcctcgattcccccag

SEQ ID NO: 824 - DNA, 50 bp, Artificial Sequence
  Description of Artificial Sequence: Synthetic oligonucleotide
  Description of Combined DNA/RNA Molecule: Synthetic oligonucleotide
ttagccgccaaacgtaccacgttttttagggtcgtttttgggcacgggta

SEQ ID NO: 825 - DNA, 64 bp, Artificial Sequence
  Description of Artificial Sequence: Synthetic oligonucleotide
gggcggatttttcgttaatattttgtttgtaagattttttattgtgggcaggaacacgatagta

SEQ ID NO: 826 - DNA, 26 bp, Artificial Sequence
  Description of Artificial Sequence: Synthetic probe
aatgggcacgggcggatttttcgtta

SEQ ID NO: 827 - DNA, 19 bp, Artificial Sequence
  Description of Artificial Sequence: Synthetic primer
ttagccgccaaacgtacca

SEQ ID NO: 828 - DNA, 20 bp, Artificial Sequence
  Description of Artificial Sequence: Synthetic primer
tactatcgtgttcctgccca

SEQ ID NO: 829 - DNA, 20 bp, Artificial Sequence
  Description of Artificial Sequence: Synthetic primer
  Description of Combined DNA/RNA Molecule: Synthetic primer
ggcgttttcgtcggcgggtg

SEQ ID NO: 830 - DNA, 30 bp, Artificial Sequence
  Description of Artificial Sequence: Synthetic primer
  Description of Combined DNA/RNA Molecule: Synthetic primer
ggtgtcgtggtcggttgttgggcgtaaaat

SEQ ID NO: 831 - DNA, 52 bp, Artificial Sequence
  Description of Artificial Sequence: Synthetic oligonucleotide
  Description of Combined DNA/RNA Molecule: Synthetic oligonucleotide
tagcagctgaacaacccaacggtgtagatgtttttcgtttgaggctcgttcc

SEQ ID NO: 832 - DNA, 53 bp, Artificial Sequence
  Description of Artificial Sequence: Synthetic oligonucleotide
gttttcgtttggtttgcggcgtttagttgataggttgtatggtcggcatgcta

SEQ ID NO: 833 - DNA, 27 bp, Artificial Sequence
  Description of Artificial Sequence: Synthetic probe
aagaggctcgttttcgtttggtttgcg

SEQ ID NO: 834 - DNA, 20 bp, Artificial Sequence
  Description of Artificial Sequence: Synthetic primer
tagcagctgaacaacccaac

SEQ ID NO: 835 - DNA, 20 bp, Artificial Sequence
  Description of Artificial Sequence: Synthetic primer
tagcatgccgaccatacaac

SEQ ID NO: 836 - DNA, 46 bp, Artificial Sequence
  Description of Artificial Sequence: Synthetic primer
  Description of Combined DNA/RNA Molecule: Synthetic primer
tagcatgccgaccatacaacacgcccaacaaccgaaaaatgaaaag

SEQ ID NO: 837 - DNA, 31 bp, Artificial Sequence
  Description of Artificial Sequence: Synthetic primer
  Description of Combined DNA/RNA Molecule: Synthetic primer
ttaattttcgtttaggttttcgtttcgggtc

SEQ ID NO: 838 - DNA, 43 bp, Artificial Sequence
  Description of Artificial Sequence: Synthetic primer
  Description of Combined DNA/RNA Molecule: Synthetic primer
ggtgtcgtggctaaacaatcaaacgaactaaaatacgautccc

SEQ ID NO: 839 - DNA, 56 bp, Artificial Sequence
  Description of Artificial Sequence: Synthetic oligonucleotide
  Description of Combined DNA/RNA Molecule: Synthetic oligonucleotide
tctgcccttcgcttcgaacgttttcgagggtttattttttagttttgaggcggtgg

SEQ ID NO: 840 - DNA, 53 bp, Artificial Sequence
  Description of Artificial Sequence: Synthetic oligonucleotide
ggtaaacgttttatttttagtggcgagtgcgaggttgtatggtcggcatgcta

SEQ ID NO: 841 - DNA, 34 bp, Artificial Sequence
  Description of Artificial Sequence: Synthetic probe
aattgaggcggtaaacgttttatttttagtggcg

SEQ ID NO: 842 - DNA, 19 bp, Artificial Sequence
  Description of Artificial Sequence: Synthetic primer
tctgcccttcgcttcgaac

SEQ ID NO: 843 - DNA, 20 bp, Artificial Sequence
  Description of Artificial Sequence: Synthetic primer
tagcatgccgaccatacaac

SEQ ID NO: 844 - DNA, 55 bp, Artificial Sequence
  Description of Artificial Sequence: Synthetic primer
  Description of Combined DNA/RNA Molecule: Synthetic primer
tagcatgccgaccatacaaccaatcaaacgaactaaaatacgattccttgcactt

SEQ ID NO: 845 - DNA, 24 bp, Artificial Sequence
  Description of Artificial Sequence: Synthetic primer
  Description of Combined DNA/RNA Molecule: Synthetic primer
gttagcgtcgtcgtttgtcgggag

SEQ ID NO: 846 - DNA, 38 bp, Artificial Sequence
  Description of Artificial Sequence: Synthetic primer
  Description of Combined DNA/RNA Molecule: Synthetic primer
ggtgtcgtgggtaaactcgttcctactaaacgccgaca

SEQ ID NO: 847 - DNA, 47 bp, Artificial Sequence
  Description of Artificial Sequence: Synthetic oligonucleotide
  Description of Combined DNA/RNA Molecule: Synthetic oligonucleotide
ttgcaaaccacccggacaagaggaggttggtttagggttctcggcac

SEQ ID NO: 848 - DNA, 54 bp, Artificial Sequence
  Description of Artificial Sequence: Synthetic oligonucleotide
ggcgtatagcggttaacgtttagtttattcgcggttggtcagcatcgactccta

SEQ ID NO: 849 - DNA, 33 bp, Artificial Sequence
  Description of Artificial Sequence: Synthetic probe
ttggttctcggcgtatagcggttaacgtttagt

SEQ ID NO: 850 - DNA, 19 bp, Artificial Sequence
  Description of Artificial Sequence: Synthetic primer
ttgcaaaccacccggacaa

SEQ ID NO: 851 - DNA, 20 bp, Artificial Sequence
  Description of Artificial Sequence: Synthetic primer
taggagtcgatgctgaccaa

SEQ ID NO: 852 - DNA, 45 bp, Artificial Sequence
  Description of Artificial Sequence: Synthetic primer
  Description of Combined DNA/RNA Molecule: Synthetic primer
taggagtcgatgctgaccaacctactaaacgccgacgctgcgaac

SEQ ID NO: 853 - DNA, 26 bp, Artificial Sequence
  Description of Artificial Sequence: Synthetic primer
  Description of Combined DNA/RNA Molecule: Synthetic primer
cgtgtatgtcggtgtttgtacgagga

SEQ ID NO: 854 - DNA, 36 bp, Artificial Sequence
  Description of Artificial Sequence: Synthetic primer
  Description of Combined DNA/RNA Molecule: Synthetic primer
ggtgtcgtggtcctaaaccaacgaaaaacccctcct

SEQ ID NO: 855 - DNA, 44 bp, Artificial Sequence
  Description of Artificial Sequence: Synthetic oligonucleotide
  Description of Combined DNA/RNA Molecule: Synthetic oligonucleotide
taagacgtatgctagcgccaagagcgggtgtgtgagcgcggtcc

SEQ ID NO: 856 - DNA, 54 bp, Artificial Sequence
  Description of Artificial Sequence: Synthetic oligonucleotide
ggtttttttaagtgtggtatggtattgcgcgtcgttggtcagcatcgactccta

SEQ ID NO: 857 - DNA, 32 bp, Artificial Sequence
  Description of Artificial Sequence: Synthetic probe
aatgagcgcggtttttttaagtgtggtatggt

SEQ ID NO: 858 - DNA, 21 bp, Artificial Sequence
  Description of Artificial Sequence: Synthetic primer
taagacgtatgctagcgccaa

SEQ ID NO: 859 - DNA, 20 bp, Artificial Sequence
  Description of Artificial Sequence: Synthetic primer
taggagtcgatgctgaccaa

SEQ ID NO: 860 - DNA, 46 bp, Artificial Sequence
  Description of Artificial Sequence: Synthetic primer
  Description of Combined DNA/RNA Molecule: Synthetic primer
taggagtcgatgctgaccaacatattaacccacgcgacgtgcaatg

SEQ ID NO: 861 - DNA, 22 bp, Artificial Sequence
  Description of Artificial Sequence: Synthetic primer
  Description of Combined DNA/RNA Molecule: Synthetic primer
gattacgtgggtcgcgcgattg

SEQ ID NO: 862 - DNA, 36 bp, Artificial Sequence
  Description of Artificial Sequence: Synthetic primer
  Description of Combined DNA/RNA Molecule: Synthetic primer
ggtgtcgtggacattttaaaacgtcccgcacucccg

SEQ ID NO: 863 - DNA, 41 bp, Artificial Sequence
  Description of Artificial Sequence: Synthetic oligonucleotide
  Description of Combined DNA/RNA Molecule: Synthetic oligonucleotide
tacatgccatcccacgacatcggtggttcgggcatcggcaa

SEQ ID NO: 864 - DNA, 39 bp, Artificial Sequence
  Description of Artificial Sequence: Synthetic oligonucleotide
ggcgaggagttgttcggcggtgtgtcggagcggttacta

SEQ ID NO: 865 - DNA, 21 bp, Artificial Sequence
  Description of Artificial Sequence: Synthetic probe
aagagcatcggcgaggagttg

SEQ ID NO: 866 - DNA, 19 bp, Artificial Sequence
  Description of Artificial Sequence: Synthetic primer
tacatgccatcccacgaca

SEQ ID NO: 867 - DNA, 19 bp, Artificial Sequence
  Description of Artificial Sequence: Synthetic primer
tagtaaccgctccgacaca

SEQ ID NO: 868 - DNA, 45 bp, Artificial Sequence
  Description of Artificial Sequence: Synthetic primer
  Description of Combined DNA/RNA Molecule: Synthetic primer
tagtaaccgctccgacacaacattacactatccgccgctgaacag

SEQ ID NO: 869 - DNA, 25 bp, Artificial Sequence
  Description of Artificial Sequence: Synthetic primer
  Description of Combined DNA/RNA Molecule: Synthetic primer
ggtagttttttggcggttgcgttta

SEQ ID NO: 870 - DNA, 33 bp, Artificial Sequence
  Description of Artificial Sequence: Synthetic primer
  Description of Combined DNA/RNA Molecule: Synthetic primer
ggtgtcgtggcttcgacgtctaacccgacgctt

SEQ ID NO: 871 - DNA, 58 bp, Artificial Sequence
  Description of Artificial Sequence: Synthetic oligonucleotide
  Description of Combined DNA/RNA Molecule: Synthetic oligonucleotide
tagggcgacagttaccacaagtgtttcgggaggatcggatattttaatttctcggtcc

SEQ ID NO: 872 - DNA, 47 bp, Artificial Sequence
  Description of Artificial Sequence: Synthetic oligonucleotide
ggtttttaacgcgggcgtttgttcgcgttgtgggtctcgctcgtata

SEQ ID NO: 873 - DNA, 31 bp, Artificial Sequence
  Description of Artificial Sequence: Synthetic probe
ccatttctcggtttttaacgcgggcgtttgt

SEQ ID NO: 874 - DNA, 20 bp, Artificial Sequence
  Description of Artificial Sequence: Synthetic primer
tagggcgacagttaccacaa

SEQ ID NO: 875 - DNA, 20 bp, Artificial Sequence
  Description of Artificial Sequence: Synthetic primer
tatacgagcgagacccacaa

SEQ ID NO: 876 - DNA, 43 bp, Artificial Sequence
  Description of Artificial Sequence: Synthetic primer
  Description of Combined DNA/RNA Molecule: Synthetic primer
tatacgagcgagacccacaatctaacccgacgctcgtgaacag

SEQ ID NO: 877 - DNA, 25 bp, Artificial Sequence
  Description of Artificial Sequence: Synthetic primer
  Description of Combined DNA/RNA Molecule: Synthetic primer
atttgttattcgcgtgcgtcgtttc

SEQ ID NO: 878 - DNA, 42 bp, Artificial Sequence
  Description of Artificial Sequence: Synthetic primer
  Description of Combined DNA/RNA Molecule: Synthetic primer
ggtgtcgtggattcgaaacactactctaatacgatccuaatg

SEQ ID NO: 879 - DNA, 66 bp, Artificial Sequence
  Description of Artificial Sequence: Synthetic oligonucleotide
  Description of Combined DNA/RNA Molecule: Synthetic oligonucleotide
tccgactttagtgcgtcacaaattttggttatatttttttttatttgcggtgttttatctcgcgcg

SEQ ID NO: 880 - DNA, 59 bp, Artificial Sequence
  Description of Artificial Sequence: Synthetic oligonucleotide
gcgtaagatgcgttgatagaggttattttaaacgaatttttgtgggtctcgctcgtata

SEQ ID NO: 881 - DNA, 36 bp, Artificial Sequence
  Description of Artificial Sequence: Synthetic probe
aattatctcgcgtaagatgcgttgatagaggttatt

SEQ ID NO: 882 - DNA, 21 bp, Artificial Sequence
  Description of Artificial Sequence: Synthetic primer
tccgactttagtgcgtcacaa

SEQ ID NO: 883 - DNA, 20 bp, Artificial Sequence
  Description of Artificial Sequence: Synthetic primer
tatacgagcgagacccacaa

SEQ ID NO: 884 - DNA, 64 bp, Artificial Sequence
  Description of Artificial Sequence: Synthetic primer
  Description of Combined DNA/RNA Molecule: Synthetic primer
tatacgagcgagacccacaaaacactactctaatacgatcctaataaaaaataaatttguttag

SEQ ID NO: 885 - DNA, 30 bp, Artificial Sequence
  Description of Artificial Sequence: Synthetic primer
  Description of Combined DNA/RNA Molecule: Synthetic primer
ggatgtaaatataaaatagcgacgcgggag

SEQ ID NO: 886 - DNA, 43 bp, Artificial Sequence
  Description of Artificial Sequence: Synthetic primer
  Description of Combined DNA/RNA Molecule: Synthetic primer
ggtgtcgtggggcgaaaaaaaattaacgaaacaaaatcccgag

SEQ ID NO: 887 - DNA, 57 bp, Artificial Sequence
  Description of Artificial Sequence: Synthetic oligonucleotide
  Description of Combined DNA/RNA Molecule: Synthetic oligonucleotide
tcaaacaaaggcgaccacaacatcgatttgttataaagggagaggtgtagacgtaat

SEQ ID NO: 888 - DNA, 70 bp, Artificial Sequence
  Description of Artificial Sequence: Synthetic oligonucleotide
gtagcgtaaaggaattgtttgtttaatttattagttatattttttcgggttgtcgcataggcagttcata

SEQ ID NO: 889 - DNA, 41 bp, Artificial Sequence
  Description of Artificial Sequence: Synthetic probe
aatgtagacgtagcgtaaaggaattgtttgtttaatttatt

SEQ ID NO: 890 - DNA, 21 bp, Artificial Sequence
  Description of Artificial Sequence: Synthetic primer
tcaaacaaaggcgaccacaac

SEQ ID NO: 891 - DNA, 22 bp, Artificial Sequence
  Description of Artificial Sequence: Synthetic primer
tatgaactgcctatgcgacaac

SEQ ID NO: 892 - DNA, 56 bp, Artificial Sequence
  Description of Artificial Sequence: Synthetic primer
  Description of Combined DNA/RNA Molecule: Synthetic primer
tatgaactgcctatgcgacaacgcgaaaaaaaattaacgaaacaaaatcctgaaag

SEQ ID NO: 893 - DNA, 27 bp, Artificial Sequence
  Description of Artificial Sequence: Synthetic primer
  Description of Combined DNA/RNA Molecule: Synthetic primer
cgagttgtaaagttgttgtcgcggcgc

SEQ ID NO: 894 - DNA, 36 bp, Artificial Sequence
  Description of Artificial Sequence: Synthetic primer
  Description of Combined DNA/RNA Molecule: Synthetic primer
ggtgtcgtggcgaacgaaaaaaaaccccgaccaaat

SEQ ID NO: 895 - DNA, 44 bp, Artificial Sequence
  Description of Artificial Sequence: Synthetic oligonucleotide
  Description of Combined DNA/RNA Molecule: Synthetic oligonucleotide
taaacaatgagacccgctgaacggcgtcgggaacggcgcgcgcc

SEQ ID NO: 896 - DNA, 55 bp, Artificial Sequence
  Description of Artificial Sequence: Synthetic oligonucleotide
gcgtttaatttttagcgggagtcgttaggtttggttgtcgcataggcagttcata

SEQ ID NO: 897 - DNA, 27 bp, Artificial Sequence
  Description of Artificial Sequence: Synthetic probe
ttacggcgcgcgtttaatttttagcgg

SEQ ID NO: 898 - DNA, 22 bp, Artificial Sequence
  Description of Artificial Sequence: Synthetic primer
taaacaatgagacccgctgaac

SEQ ID NO: 899 - DNA, 22 bp, Artificial Sequence
  Description of Artificial Sequence: Synthetic primer
tatgaactgcctatgcgacaac

SEQ ID NO: 900 - DNA, 48 bp, Artificial Sequence
  Description of Artificial Sequence: Synthetic primer
  Description of Combined DNA/RNA Molecule: Synthetic primer
tatgaactgcctatgcgacaaccccgaccaaaccaaacctaatgactt

SEQ ID NO: 901 - DNA, 29 bp, Artificial Sequence
  Description of Artificial Sequence: Synthetic primer
  Description of Combined DNA/RNA Molecule: Synthetic primer
gtggtcgtcgttttgtttttttacgtttc

SEQ ID NO: 902 - DNA, 31 bp, Artificial Sequence
  Description of Artificial Sequence: Synthetic primer
  Description of Combined DNA/RNA Molecule: Synthetic primer
ggtgtcgtggcccgaacgaaaccgccaaaag

SEQ ID NO: 903 - DNA, 49 bp, Artificial Sequence
  Description of Artificial Sequence: Synthetic oligonucleotide
  Description of Combined DNA/RNA Molecule: Synthetic oligonucleotide
tccggatcaaagcagccacttttatttcggtcggttcggagctcgttcg

SEQ ID NO: 904 - DNA, 55 bp, Artificial Sequence
  Description of Artificial Sequence: Synthetic oligonucleotide
gtttacgcggattttcgttttgttttagtttagcgtgtgtgttggcgtacggtga

SEQ ID NO: 905 - DNA, 31 bp, Artificial Sequence
  Description of Artificial Sequence: Synthetic probe
aaggagctcgtttacgcggattttcgttttg

SEQ ID NO: 906 - DNA, 19 bp, Artificial Sequence
  Description of Artificial Sequence: Synthetic primer
tccggatcaaagcagccac

SEQ ID NO: 907 - DNA, 19 bp, Artificial Sequence
  Description of Artificial Sequence: Synthetic primer
tcaccgtacgccaacacac

SEQ ID NO: 908 - DNA, 46 bp, Artificial Sequence
  Description of Artificial Sequence: Synthetic primer
  Description of Combined DNA/RNA Molecule: Synthetic primer
tcaccgtacgccaacacaccgaacgaaaccgccaaaaaatgctaag

SEQ ID NO: 909 - DNA, 19 bp, Artificial Sequence
  Description of Artificial Sequence: Synthetic primer
  Description of Combined DNA/RNA Molecule: Synthetic primer
atgtgcgggtcggcgggtc

SEQ ID NO: 910 - DNA, 36 bp, Artificial Sequence
  Description of Artificial Sequence: Synthetic primer
  Description of Combined DNA/RNA Molecule: Synthetic primer
ggtgtcgtggtctactctcaacacctcccaaucctc

SEQ ID NO: 911 - DNA, 47 bp, Artificial Sequence
  Description of Artificial Sequence: Synthetic oligonucleotide
  Description of Combined DNA/RNA Molecule: Synthetic oligonucleotide
tcatcgccctcagatcttccaggtcggcgggtttgtgatctcggagt

SEQ ID NO: 912 - DNA, 59 bp, Artificial Sequence
  Description of Artificial Sequence: Synthetic oligonucleotide
ggaacgttttttgttatttttttgcgcgaatttgaaagtggaggatagattggagggca

SEQ ID NO: 913 - DNA, 35 bp, Artificial Sequence
  Description of Artificial Sequence: Synthetic probe
aatgatctcggaacgttttttgttatttttttgcg

SEQ ID NO: 914 - DNA, 21 bp, Artificial Sequence
  Description of Artificial Sequence: Synthetic primer
tcatcgccctcagatcttcca

SEQ ID NO: 915 - DNA, 21 bp, Artificial Sequence
  Description of Artificial Sequence: Synthetic primer
tgccctccaatctatcctcca

SEQ ID NO: 916 - DNA, 50 bp, Artificial Sequence
  Description of Artificial Sequence: Synthetic primer
  Description of Combined DNA/RNA Molecule: Synthetic primer
tgccctccaatctatcctccacacctcccaatcctttcaaatttgcgcag

SEQ ID NO: 917 - DNA, 19 bp, Artificial Sequence
  Description of Artificial Sequence: Synthetic primer
  Description of Combined DNA/RNA Molecule: Synthetic primer
gtggcggtgttggcgtagc

SEQ ID NO: 918 - DNA, 36 bp, Artificial Sequence
  Description of Artificial Sequence: Synthetic primer
  Description of Combined DNA/RNA Molecule: Synthetic primer
ggtgtcgtggtcttcatcaccttcgaaaaccaaaag

SEQ ID NO: 919 - DNA, 44 bp, Artificial Sequence
  Description of Artificial Sequence: Synthetic oligonucleotide
  Description of Combined DNA/RNA Molecule: Synthetic oligonucleotide
ttcgtgggcacacaagcaagcggtgttggcgtagtaagcggaat

SEQ ID NO: 920 - DNA, 39 bp, Artificial Sequence
  Description of Artificial Sequence: Synthetic oligonucleotide
ggagcgtcgggtgcgcgttgcttggcttgatctacctga

SEQ ID NO: 921 - DNA, 23 bp, Artificial Sequence
  Description of Artificial Sequence: Synthetic probe
aaagtaagcggagcgtcgggtgc

SEQ ID NO: 922 - DNA, 19 bp, Artificial Sequence
  Description of Artificial Sequence: Synthetic primer
ttcgtgggcacacaagcaa

SEQ ID NO: 923 - DNA, 22 bp, Artificial Sequence
  Description of Artificial Sequence: Synthetic primer
tcaggtagatcaagccaagcaa

SEQ ID NO: 924 - DNA, 46 bp, Artificial Sequence
  Description of Artificial Sequence: Synthetic primer
  Description of Combined DNA/RNA Molecule: Synthetic primer
tcaggtagatcaagccaagcaaaaccaaaaacgcgaccctgcgcat

SEQ ID NO: 925 - DNA, 25 bp, Artificial Sequence
  Description of Artificial Sequence: Synthetic primer
  Description of Combined DNA/RNA Molecule: Synthetic primer
ggtacgttttagtcgggtgcggttc

SEQ ID NO: 926 - DNA, 33 bp, Artificial Sequence
  Description of Artificial Sequence: Synthetic primer
  Description of Combined DNA/RNA Molecule: Synthetic primer
ggtgtcgtggacacgaacccaaccgaaccatac

SEQ ID NO: 927 - DNA, 50 bp, Artificial Sequence
  Description of Artificial Sequence: Synthetic oligonucleotide
  Description of Combined DNA/RNA Molecule: Synthetic oligonucleotide
ttgaaggaggaaatcggcacagcggttttttttagcgcgtttggcgggca

SEQ ID NO: 928 - DNA, 63 bp, Artificial Sequence
  Description of Artificial Sequence: Synthetic oligonucleotide
gggtgttagttttcgtagtttaatgagtttaggttttttcgtgtcgaaccgttttaggactga

SEQ ID NO: 929 - DNA, 36 bp, Artificial Sequence
  Description of Artificial Sequence: Synthetic probe
ttgtttggcgggtgttagttttcgtagtttaatgag

SEQ ID NO: 930 - DNA, 21 bp, Artificial Sequence
  Description of Artificial Sequence: Synthetic primer
ttgaaggaggaaatcggcaca

SEQ ID NO: 931 - DNA, 22 bp, Artificial Sequence
  Description of Artificial Sequence: Synthetic primer
tcagtcctaaaacggttcgaca

SEQ ID NO: 932 - DNA, 49 bp, Artificial Sequence
  Description of Artificial Sequence: Synthetic primer
  Description of Combined DNA/RNA Molecule: Synthetic primer
tcagtcctaaaacggttcgacacgaacccaaccgaaccatattgaaaag

SEQ ID NO: 933 - DNA, 28 bp, Artificial Sequence
  Description of Artificial Sequence: Synthetic primer
  Description of Combined DNA/RNA Molecule: Synthetic primer
tttgttcgttttcgtttttgagcgtttc

SEQ ID NO: 934 - DNA, 43 bp, Artificial Sequence
  Description of Artificial Sequence: Synthetic primer
  Description of Combined DNA/RNA Molecule: Synthetic primer
ggtgtcgtggctaactctaactaaaactaaataacccgcaagt

SEQ ID NO: 935 - DNA, 48 bp, Artificial Sequence
  Description of Artificial Sequence: Synthetic oligonucleotide
  Description of Combined DNA/RNA Molecule: Synthetic oligonucleotide
ttcggcaggctacggtacacgtttttaattgcgcgaaggtatcgtttt

SEQ ID NO: 936 - DNA, 55 bp, Artificial Sequence
  Description of Artificial Sequence: Synthetic oligonucleotide
gttttgggttaggaatcgtcgtattaacgattgtgtcgaaccgttttaggactga

SEQ ID NO: 937 - DNA, 33 bp, Artificial Sequence
  Description of Artificial Sequence: Synthetic probe
ttaggtatcgttttgggttaggaatcgtcgtat

SEQ ID NO: 938 - DNA, 19 bp, Artificial Sequence
  Description of Artificial Sequence: Synthetic primer
ttcggcaggctacggtaca

SEQ ID NO: 939 - DNA, 22 bp, Artificial Sequence
  Description of Artificial Sequence: Synthetic primer
tcagtcctaaaacggttcgaca

SEQ ID NO: 940 - DNA, 58 bp, Artificial Sequence
  Description of Artificial Sequence: Synthetic primer
  Description of Combined DNA/RNA Molecule: Synthetic primer
tcagtcctaaaacggttcgacaactctaactaaaactaaataacccgcaattgutaac

SEQ ID NO: 941 - DNA, 22 bp, Artificial Sequence
  Description of Artificial Sequence: Synthetic primer
  Description of Combined DNA/RNA Molecule: Synthetic primer
tgtagacgaggaggcgcgggca

SEQ ID NO: 942 - DNA, 30 bp, Artificial Sequence
  Description of Artificial Sequence: Synthetic primer
  Description of Combined DNA/RNA Molecule: Synthetic primer
ggtgtcgtgggaacgcgaccccgaacgaca

SEQ ID NO: 943 - DNA, 50 bp, Artificial Sequence
  Description of Artificial Sequence: Synthetic oligonucleotide
  Description of Combined DNA/RNA Molecule: Synthetic oligonucleotide
tctcgacgatgaaaagcaacagattgtttgtgttaggagagcagcggagg

SEQ ID NO: 944 - DNA, 48 bp, Artificial Sequence
  Description of Artificial Sequence: Synthetic oligonucleotide
ggaaaattcggcgtggagcgtttgtagtttgtgggtactgtccgtgga

SEQ ID NO: 945 - DNA, 26 bp, Artificial Sequence
  Description of Artificial Sequence: Synthetic probe
ttgagcagcggaaaattcggcgtgga

SEQ ID NO: 946 - DNA, 21 bp, Artificial Sequence
  Description of Artificial Sequence: Synthetic primer
tctcgacgatgaaaagcaaca

SEQ ID NO: 947 - DNA, 19 bp, Artificial Sequence
  Description of Artificial Sequence: Synthetic primer
tccacggacagtacccaca

SEQ ID NO: 948 - DNA, 46 bp, Artificial Sequence
  Description of Artificial Sequence: Synthetic primer
  Description of Combined DNA/RNA Molecule: Synthetic primer
tccacggacagtacccacacccgaacgacgaactacaaatgctccg

SEQ ID NO: 949 - DNA, 24 bp, Artificial Sequence
  Description of Artificial Sequence: Synthetic primer
  Description of Combined DNA/RNA Molecule: Synthetic primer
gagggtatagttggagggcgagtc

SEQ ID NO: 950 - DNA, 33 bp, Artificial Sequence
  Description of Artificial Sequence: Synthetic primer
  Description of Combined DNA/RNA Molecule: Synthetic primer
ggtgtcgtggaaacctccctcgcttaccctatt

SEQ ID NO: 951 - DNA, 54 bp, Artificial Sequence
  Description of Artificial Sequence: Synthetic oligonucleotide
  Description of Combined DNA/RNA Molecule: Synthetic oligonucleotide
ttctaggcgacacgacaacagttgtttgtttgtttttttcgatgcgctcgggaa

SEQ ID NO: 952 - DNA, 52 bp, Artificial Sequence
  Description of Artificial Sequence: Synthetic oligonucleotide
gggagttattgtagagtttgttttttgcggttttgtgggtactgtccgtgga

SEQ ID NO: 953 - DNA, 29 bp, Artificial Sequence
  Description of Artificial Sequence: Synthetic probe
tttgcgctcgggagttattgtagagtttg

SEQ ID NO: 954 - DNA, 20 bp, Artificial Sequence
  Description of Artificial Sequence: Synthetic primer
ttctaggcgacacgacaaca

SEQ ID NO: 955 - DNA, 19 bp, Artificial Sequence
  Description of Artificial Sequence: Synthetic primer
tccacggacagtacccaca

SEQ ID NO: 956 - DNA, 47 bp, Artificial Sequence
  Description of Artificial Sequence: Synthetic primer
  Description of Combined DNA/RNA Molecule: Synthetic primer
tccacggacagtacccacagcttaccctatccccaaaaactgcaaag

SEQ ID NO: 957 - DNA, 21 bp, Artificial Sequence
  Description of Artificial Sequence: Synthetic primer
  Description of Combined DNA/RNA Molecule: Synthetic primer
gtagggatcgtcgggcgggag

SEQ ID NO: 958 - DNA, 36 bp, Artificial Sequence
  Description of Artificial Sequence: Synthetic primer
  Description of Combined DNA/RNA Molecule: Synthetic primer
ggtgtcgtggcctttaatacgctatctcgccgcaat

SEQ ID NO: 959 - DNA, 48 bp, Artificial Sequence
  Description of Artificial Sequence: Synthetic oligonucleotide
  Description of Combined DNA/RNA Molecule: Synthetic oligonucleotide
tttcaggccctaaccaccacgagaagtatttttggtggcgagcgtgaa

SEQ ID NO: 960 - DNA, 41 bp, Artificial Sequence
  Description of Artificial Sequence: Synthetic oligonucleotide
gtgggtcgcgtcgggtcgtgggtgggattaagggcgatgga

SEQ ID NO: 961 - DNA, 19 bp, Artificial Sequence
  Description of Artificial Sequence: Synthetic probe
aaggcgagcgtgggtcgcg

SEQ ID NO: 962 - DNA, 20 bp, Artificial Sequence
  Description of Artificial Sequence: Synthetic primer
tttcaggccctaaccaccac

SEQ ID NO: 963 - DNA, 20 bp, Artificial Sequence
  Description of Artificial Sequence: Synthetic primer
tccatcgcccttaatcccac

SEQ ID NO: 964 - DNA, 43 bp, Artificial Sequence
  Description of Artificial Sequence: Synthetic primer
  Description of Combined DNA/RNA Molecule: Synthetic primer
tccatcgcccttaatcccacccgactacccacgacctgacgca

SEQ ID NO: 965 - DNA, 32 bp, Artificial Sequence
  Description of Artificial Sequence: Synthetic primer
  Description of Combined DNA/RNA Molecule: Synthetic primer
gttttttttagtttggagttttggttcgggtc

SEQ ID NO: 966 - DNA, 39 bp, Artificial Sequence
  Description of Artificial Sequence: Synthetic primer
  Description of Combined DNA/RNA Molecule: Synthetic primer
ggtgtcgtggaaacaaaaaaacccaaaaacaacgcccgt

SEQ ID NO: 967 - DNA, 54 bp, Artificial Sequence
  Description of Artificial Sequence: Synthetic oligonucleotide
  Description of Combined DNA/RNA Molecule: Synthetic oligonucleotide
tatctcctaaaagaagccgcactagtttggagttttggttcgggttctcgggcc

SEQ ID NO: 968 - DNA, 52 bp, Artificial Sequence
  Description of Artificial Sequence: Synthetic oligonucleotide
gggttttaatattttttcgttgagatcgcggggtgggattaagggcgatgga

SEQ ID NO: 969 - DNA, 38 bp, Artificial Sequence
  Description of Artificial Sequence: Synthetic probe
aaggttctcgggttttaatattttttcgttgagatcgc

SEQ ID NO: 970 - DNA, 22 bp, Artificial Sequence
  Description of Artificial Sequence: Synthetic primer
tatctcctaaaagaagccgcac

SEQ ID NO: 971 - DNA, 20 bp, Artificial Sequence
  Description of Artificial Sequence: Synthetic primer
tccatcgcccttaatcccac

SEQ ID NO: 972 - DNA, 50 bp, Artificial Sequence
  Description of Artificial Sequence: Synthetic primer
  Description of Combined DNA/RNA Molecule: Synthetic primer
tccatcgcccttaatcccaccaaaaaaacccaaaaacaacgcctgcgatt

SEQ ID NO: 973 - DNA, 21 bp, Artificial Sequence
  Description of Artificial Sequence: Synthetic primer
  Description of Combined DNA/RNA Molecule: Synthetic primer
ggtaagatcgaggcgcgtttg

SEQ ID NO: 974 - DNA, 34 bp, Artificial Sequence
  Description of Artificial Sequence: Synthetic primer
  Description of Combined DNA/RNA Molecule: Synthetic primer
ggtgtcgtggcgctaaacgacaaacgcaauaaag

SEQ ID NO: 975 - DNA, 48 bp, Artificial Sequence
  Description of Artificial Sequence: Synthetic oligonucleotide
  Description of Combined DNA/RNA Molecule: Synthetic oligonucleotide
tcgctcttcagcctcctacagagggttcgtagtcgtgcgtctcgggcc

SEQ ID NO: 976 - DNA, 59 bp, Artificial Sequence
  Description of Artificial Sequence: Synthetic oligonucleotide
gggatttagattttcgttatcgttatcgttgttcggctgttctgggaattattgccgga

SEQ ID NO: 977 - DNA, 37 bp, Artificial Sequence
  Description of Artificial Sequence: Synthetic probe
aagcgtctcgggatttagattttcgttatcgttatcg

SEQ ID NO: 978 - DNA, 20 bp, Artificial Sequence
  Description of Artificial Sequence: Synthetic primer
tcgctcttcagcctcctaca

SEQ ID NO: 979 - DNA, 22 bp, Artificial Sequence
  Description of Artificial Sequence: Synthetic primer
tccggcaataattcccagaaca

SEQ ID NO: 980 - DNA, 49 bp, Artificial Sequence
  Description of Artificial Sequence: Synthetic primer
  Description of Combined DNA/RNA Molecule: Synthetic primer
tccggcaataattcccagaacaacgcaataaaacaacgtcgctgaacag

SEQ ID NO: 981 - DNA, 21 bp, Artificial Sequence
  Description of Artificial Sequence: Synthetic primer
  Description of Combined DNA/RNA Molecule: Synthetic primer
gacggaagcggagagcggaac

SEQ ID NO: 982 - DNA, 36 bp, Artificial Sequence
  Description of Artificial Sequence: Synthetic primer
  Description of Combined DNA/RNA Molecule: Synthetic primer
ggtgtcgtgggttcgctccgataaacgaaaccaaac

SEQ ID NO: 983 - DNA, 50 bp, Artificial Sequence
  Description of Artificial Sequence: Synthetic oligonucleotide
  Description of Combined DNA/RNA Molecule: Synthetic oligonucleotide
ttcaacgatcgcgcagacagttcgttgggttttttcggatgtcacgttct

SEQ ID NO: 984 - DNA, 55 bp, Artificial Sequence
  Description of Artificial Sequence: Synthetic oligonucleotide
gtttcgtttaggtagtttggaggcgtttttttgtgttctgggaattattgccgga

SEQ ID NO: 985 - DNA, 32 bp, Artificial Sequence
  Description of Artificial Sequence: Synthetic probe
ttatgtcacgtttcgtttaggtagtttggagg

SEQ ID NO: 986 - DNA, 19 bp, Artificial Sequence
  Description of Artificial Sequence: Synthetic primer
ttcaacgatcgcgcagaca

SEQ ID NO: 987 - DNA, 22 bp, Artificial Sequence
  Description of Artificial Sequence: Synthetic primer
tccggcaataattcccagaaca

SEQ ID NO: 988 - DNA, 58 bp, Artificial Sequence
  Description of Artificial Sequence: Synthetic primer
  Description of Combined DNA/RNA Molecule: Synthetic primer
tccggcaataattcccagaacactccgataaacgaaaccaaatcaaaaaaatgcccca

SEQ ID NO: 989 - DNA, 28 bp, Artificial Sequence
  Description of Artificial Sequence: Synthetic primer
  Description of Combined DNA/RNA Molecule: Synthetic primer
tttagagtcgaggtttgtaaatcgaggc

SEQ ID NO: 990 - DNA, 32 bp, Artificial Sequence
  Description of Artificial Sequence: Synthetic primer
  Description of Combined DNA/RNA Molecule: Synthetic primer
ggtgtcgtggacgacctaccccgctacctccg

SEQ ID NO: 991 - DNA, 51 bp, Artificial Sequence
  Description of Artificial Sequence: Synthetic oligonucleotide
  Description of Combined DNA/RNA Molecule: Synthetic oligonucleotide
tcactatcggcgtagtcaccagttagagtgttttcgtgggtcgggcgtacc

SEQ ID NO: 992 - DNA, 58 bp, Artificial Sequence
  Description of Artificial Sequence: Synthetic oligonucleotide
gtattttttttttgttcgggtgcgtttagttattggtgtggtgactttacccggagga

SEQ ID NO: 993 - DNA, 31 bp, Artificial Sequence
  Description of Artificial Sequence: Synthetic probe
ttgtcgggcgtattttttttttgttcgggtg

SEQ ID NO: 994 - DNA, 21 bp, Artificial Sequence
  Description of Artificial Sequence: Synthetic primer
tcactatcggcgtagtcacca

SEQ ID NO: 995 - DNA, 20 bp, Artificial Sequence
  Description of Artificial Sequence: Synthetic primer
tcctccgggtaaagtcacca

SEQ ID NO: 996 - DNA, 57 bp, Artificial Sequence
  Description of Artificial Sequence: Synthetic primer
  Description of Combined DNA/RNA Molecule: Synthetic primer
tcctccgggtaaagtcaccaactatttcctctcaaacaccaataactaaatgcacct

SEQ ID NO: 997 - DNA, 23 bp, Artificial Sequence
  Description of Artificial Sequence: Synthetic primer
  Description of Combined DNA/RNA Molecule: Synthetic primer
cgggacgggtttttttgcggatc

SEQ ID NO: 998 - DNA, 38 bp, Artificial Sequence
  Description of Artificial Sequence: Synthetic primer
  Description of Combined DNA/RNA Molecule: Synthetic primer
ggtgtcgtggacacctaaaacaataacaaccgcccgat

SEQ ID NO: 999 - DNA, 61 bp, Artificial Sequence
  Description of Artificial Sequence: Synthetic oligonucleotide
  Description of Combined DNA/RNA Molecule: Synthetic oligonucleotide
tcatctgttcgtcagggtccagattttttgaaatgaaataatgtgatgtacgttgcgatgg

SEQ ID NO: 1000 - DNA, 53 bp, Artificial Sequence
  Description of Artificial Sequence: Synthetic oligonucleotide
gataagggtcggtttgtaatgaggtttaggtcgtggtgactttacccggagga

SEQ ID NO: 1001 - DNA, 33 bp, Artificial Sequence
  Description of Artificial Sequence: Synthetic probe
aaacgttgcgataagggtcggtttgtaatgagg

SEQ ID NO: 1002 - DNA, 21 bp, Artificial Sequence
  Description of Artificial Sequence: Synthetic primer
tcatctgttcgtcagggtcca

SEQ ID NO: 1003 - DNA, 20 bp, Artificial Sequence
  Description of Artificial Sequence: Synthetic primer
tcctccgggtaaagtcacca

SEQ ID NO: 1004 - DNA, 50 bp, Artificial Sequence
  Description of Artificial Sequence: Synthetic primer
  Description of Combined DNA/RNA Molecule: Synthetic primer
tcctccgggtaaagtcaccactaaaacaataacaaccgcccgatgacctg

SEQ ID NO: 1005 - DNA, 23 bp, Artificial Sequence
  Description of Artificial Sequence: Synthetic primer
  Description of Combined DNA/RNA Molecule: Synthetic primer
tagtttttcggtggcggcggcgc

SEQ ID NO: 1006 - DNA, 33 bp, Artificial Sequence
  Description of Artificial Sequence: Synthetic primer
  Description of Combined DNA/RNA Molecule: Synthetic primer
ggtgtcgtggcgaccataaccccgacacuaaag

SEQ ID NO: 1007 - DNA, 46 bp, Artificial Sequence
  Description of Artificial Sequence: Synthetic oligonucleotide
  Description of Combined DNA/RNA Molecule: Synthetic oligonucleotide
ttcgtacctcggcacaccaggcggcgttagttggtttgcacgaagt

SEQ ID NO: 1008 - DNA, 61 bp, Artificial Sequence
  Description of Artificial Sequence: Synthetic oligonucleotide
gaaacgttttttttttcgtttcgtgtgttttattttttatttggctccgttactctgtcga

SEQ ID NO: 1009 - DNA, 41 bp, Artificial Sequence
  Description of Artificial Sequence: Synthetic probe
cctttgcacgaaacgttttttttttcgtttcgtgtgtttta

SEQ ID NO: 1010 - DNA, 19 bp, Artificial Sequence
  Description of Artificial Sequence: Synthetic primer
ttcgtacctcggcacacca

SEQ ID NO: 1011 - DNA, 20 bp, Artificial Sequence
  Description of Artificial Sequence: Synthetic primer
tcgacagagtaacggagcca

SEQ ID NO: 1012 - DNA, 51 bp, Artificial Sequence
  Description of Artificial Sequence: Synthetic primer
  Description of Combined DNA/RNA Molecule: Synthetic primer
tcgacagagtaacggagccagaccataaccccgacactaaaaaatguaaag

SEQ ID NO: 1013 - DNA, 27 bp, Artificial Sequence
  Description of Artificial Sequence: Synthetic primer
  Description of Combined DNA/RNA Molecule: Synthetic primer
taaatgtaaacgtcgagggtacgggat

SEQ ID NO: 1014 - DNA, 42 bp, Artificial Sequence
  Description of Artificial Sequence: Synthetic primer
  Description of Combined DNA/RNA Molecule: Synthetic primer
ggtgtcgtggatcaaaatctaaaacaaaaaaccgaacuttct

SEQ ID NO: 1015 - DNA, 49 bp, Artificial Sequence
  Description of Artificial Sequence: Synthetic oligonucleotide
  Description of Combined DNA/RNA Molecule: Synthetic oligonucleotide
tctacagctagatgcggccaggtacgaggcgatgttggtttcacgttcg

SEQ ID NO: 1016 - DNA, 56 bp, Artificial Sequence
  Description of Artificial Sequence: Synthetic oligonucleotide
gtttaggcgattttttttgtcgggttatagtttaggtggctccgttactctgtcga

SEQ ID NO: 1017 - DNA, 34 bp, Artificial Sequence
  Description of Artificial Sequence: Synthetic probe
aagtttcacgtttaggcgattttttttgtcgggt

SEQ ID NO: 1018 - DNA, 20 bp, Artificial Sequence
  Description of Artificial Sequence: Synthetic primer
tctacagctagatgcggcca

SEQ ID NO: 1019 - DNA, 20 bp, Artificial Sequence
  Description of Artificial Sequence: Synthetic primer
tcgacagagtaacggagcca

SEQ ID NO: 1020 - DNA, 24 bp, Artificial Sequence
  Description of Artificial Sequence: Synthetic primer
  Description of Combined DNA/RNA Molecule: Synthetic primer
gtcgtttcgaggagttttcgcgaa

SEQ ID NO: 1021 - DNA, 31 bp, Artificial Sequence
  Description of Artificial Sequence: Synthetic primer
  Description of Combined DNA/RNA Molecule: Synthetic primer
ggtgtcgtggcacgaaaccgccgaaaaaaag

SEQ ID NO: 1022 - DNA, 50 bp, Artificial Sequence
  Description of Artificial Sequence: Synthetic oligonucleotide
  Description of Combined DNA/RNA Molecule: Synthetic oligonucleotide
tagcgatagtaccgacagtcactcgcgagagttcgcggttttgtcgcgcc

SEQ ID NO: 1023 - DNA, 57 bp, Artificial Sequence
  Description of Artificial Sequence: Synthetic oligonucleotide
gcgttgataggtattagttgttttcgtttgtttgacggtgcggaaacctatcgtcga

SEQ ID NO: 1024 - DNA, 37 bp, Artificial Sequence
  Description of Artificial Sequence: Synthetic probe
ttttgtcgcgttgataggtattagttgttttcgtttg

SEQ ID NO: 1025 - DNA, 22 bp, Artificial Sequence
  Description of Artificial Sequence: Synthetic primer
tagcgatagtaccgacagtcac

SEQ ID NO: 1026 - DNA, 20 bp, Artificial Sequence
  Description of Artificial Sequence: Synthetic primer
tcgacgataggtttccgcac

SEQ ID NO: 1027 - DNA, 46 bp, Artificial Sequence
  Description of Artificial Sequence: Synthetic primer
  Description of Combined DNA/RNA Molecule: Synthetic primer
tcgacgataggtttccgcaccgccgaaaaaaaaaacgcgtgucaag

SEQ ID NO: 1028 - DNA, 21 bp, Artificial Sequence
  Description of Artificial Sequence: Synthetic primer
  Description of Combined DNA/RNA Molecule: Synthetic primer
tcgagttttgggcggcggagc

SEQ ID NO: 1029 - DNA, 32 bp, Artificial Sequence
  Description of Artificial Sequence: Synthetic primer
  Description of Combined DNA/RNA Molecule: Synthetic primer
ggtgtcgtggcgctccccctcgtactaacctt

SEQ ID NO: 1030 - DNA, 43 bp, Artificial Sequence
  Description of Artificial Sequence: Synthetic oligonucleotide
  Description of Combined DNA/RNA Molecule: Synthetic oligonucleotide
tccagggtatttggcgcacgcggagtaggatagggtgcgggca

SEQ ID NO: 1031 - DNA, 39 bp, Artificial Sequence
  Description of Artificial Sequence: Synthetic oligonucleotide
gggtgggcgcggttttcgggtgcggaaacctatcgtcga

SEQ ID NO: 1032 - DNA, 18 bp, Artificial Sequence
  Description of Artificial Sequence: Synthetic probe
ccagggtgcgggtgggcg

SEQ ID NO: 1033 - DNA, 19 bp, Artificial Sequence
  Description of Artificial Sequence: Synthetic primer
tccagggtatttggcgcac

SEQ ID NO: 1034 - DNA, 20 bp, Artificial Sequence
  Description of Artificial Sequence: Synthetic primer
tcgacgataggtttccgcac

SEQ ID NO: 1035 - DNA, 48 bp, Artificial Sequence
  Description of Artificial Sequence: Synthetic primer
  Description of Combined DNA/RNA Molecule: Synthetic primer
tcgacgataggtttccgcactcgtactaacctcccgaaaactgcgcct

SEQ ID NO: 1036 - DNA, 25 bp, Artificial Sequence
  Description of Artificial Sequence: Synthetic primer
  Description of Combined DNA/RNA Molecule: Synthetic primer
gattcggaggatggattagcgttgc

SEQ ID NO: 1037 - DNA, 30 bp, Artificial Sequence
  Description of Artificial Sequence: Synthetic primer
  Description of Combined DNA/RNA Molecule: Synthetic primer
ggtgtcgtggacgccccctacgcaaaaccc

SEQ ID NO: 1038 - DNA, 51 bp, Artificial Sequence
  Description of Artificial Sequence: Synthetic oligonucleotide
  Description of Combined DNA/RNA Molecule: Synthetic oligonucleotide
tccctcgtcatctcccttacctgggaggaggttttcggagattctcgttga

SEQ ID NO: 1039 - DNA, 47 bp, Artificial Sequence
  Description of Artificial Sequence: Synthetic oligonucleotide
gttaggaggatttcgcgggtagggagtcggtcttggtgatggagcga

SEQ ID NO: 1040 - DNA, 28 bp, Artificial Sequence
  Description of Artificial Sequence: Synthetic probe
ttgattctcgttaggaggatttcgcggg

SEQ ID NO: 1041 - DNA, 21 bp, Artificial Sequence
  Description of Artificial Sequence: Synthetic primer
tccctcgtcatctcccttacc

SEQ ID NO: 1042 - DNA, 19 bp, Artificial Sequence
  Description of Artificial Sequence: Synthetic primer
tcgctccatcaccaagacc

SEQ ID NO: 1043 - DNA, 42 bp, Artificial Sequence
  Description of Artificial Sequence: Synthetic primer
  Description of Combined DNA/RNA Molecule: Synthetic primer
tcgctccatcaccaagacccgcaaaacctcctccctgactct

SEQ ID NO: 1044 - DNA, 20 bp, Artificial Sequence
  Description of Artificial Sequence: Synthetic primer
  Description of Combined DNA/RNA Molecule: Synthetic primer
gaggcgggtgtttgcgggac

SEQ ID NO: 1045 - DNA, 35 bp, Artificial Sequence
  Description of Artificial Sequence: Synthetic primer
  Description of Combined DNA/RNA Molecule: Synthetic primer
ggtgtcgtggctctctccacccaacgaataaatag

SEQ ID NO: 1046 - DNA, 47 bp, Artificial Sequence
  Description of Artificial Sequence: Synthetic oligonucleotide
  Description of Combined DNA/RNA Molecule: Synthetic oligonucleotide
tcataatgttgtcagcccgaccgtcgaagtagaggcgtcatcgagcc

SEQ ID NO: 1047 - DNA, 52 bp, Artificial Sequence
  Description of Artificial Sequence: Synthetic oligonucleotide
gagttgaagacgtgtatttcgagcgtttttgcgggtcttggtgatggagcga

SEQ ID NO: 1048 - DNA, 32 bp, Artificial Sequence
  Description of Artificial Sequence: Synthetic probe
ttgggcatcgtcgagttgaagacgtgtatttc

SEQ ID NO: 1049 - DNA, 22 bp, Artificial Sequence
  Description of Artificial Sequence: Synthetic primer
tcataatgttgtcagcccgacc

SEQ ID NO: 1050 - DNA, 19 bp, Artificial Sequence
  Description of Artificial Sequence: Synthetic primer
tcgctccatcaccaagacc

SEQ ID NO: 1051 - DNA, 52 bp, Artificial Sequence
  Description of Artificial Sequence: Synthetic primer
  Description of Combined DNA/RNA Molecule: Synthetic primer
tcgctccatcaccaagaccacccaacgaataaataaacgcaaaaatgctcgg

SEQ ID NO: 1052 - DNA, 23 bp, Artificial Sequence
  Description of Artificial Sequence: Synthetic primer
  Description of Combined DNA/RNA Molecule: Synthetic primer
gggtcggttgtcgttagcgtttc

SEQ ID NO: 1053 - DNA, 36 bp, Artificial Sequence
  Description of Artificial Sequence: Synthetic primer
  Description of Combined DNA/RNA Molecule: Synthetic primer
ggtgtcgtggcttcaaataaaccgccgcttauatcc

SEQ ID NO: 1054 - DNA, 50 bp, Artificial Sequence
  Description of Artificial Sequence: Synthetic oligonucleotide
  Description of Combined DNA/RNA Molecule: Synthetic oligonucleotide
tacgaatcacccgagagttcaagttagcgttttttttcggcgatcgcggc

SEQ ID NO: 1055 - DNA, 61 bp, Artificial Sequence
  Description of Artificial Sequence: Synthetic oligonucleotide
gcgattttttttcgttgattttattcgagtcgtcgtttgttgtgggtgggtataggtcaga

SEQ ID NO: 1056 - DNA, 36 bp, Artificial Sequence
  Description of Artificial Sequence: Synthetic probe
aaggcgatcgcgattttttttcgttgattttattcg

SEQ ID NO: 1057 - DNA, 22 bp, Artificial Sequence
  Description of Artificial Sequence: Synthetic primer
tacgaatcacccgagagttcaa

SEQ ID NO: 1058 - DNA, 22 bp, Artificial Sequence
  Description of Artificial Sequence: Synthetic primer
tctgacctatacccacccacaa

SEQ ID NO: 1059 - DNA, 51 bp, Artificial Sequence
  Description of Artificial Sequence: Synthetic primer
  Description of Combined DNA/RNA Molecule: Synthetic primer
tctgacctatacccacccacaacgcttatatctacgccaaacgatgactca

SEQ ID NO: 1060 - DNA, 26 bp, Artificial Sequence
  Description of Artificial Sequence: Synthetic primer
  Description of Combined DNA/RNA Molecule: Synthetic primer
gcgatgatttttagggtggacgagtt

SEQ ID NO: 1061 - DNA, 35 bp, Artificial Sequence
  Description of Artificial Sequence: Synthetic primer
  Description of Combined DNA/RNA Molecule: Synthetic primer
ggtgtcgtggccaactacaactccgccatcuaccc

SEQ ID NO: 1062 - DNA, 51 bp, Artificial Sequence
  Description of Artificial Sequence: Synthetic oligonucleotide
  Description of Combined DNA/RNA Molecule: Synthetic oligonucleotide
tacgaatcacccgagagttcaagacgagtttggttttgagaggatcggaaa

SEQ ID NO: 1063 - DNA, 53 bp, Artificial Sequence
  Description of Artificial Sequence: Synthetic oligonucleotide
ggagggttcgagagcgttaagagagagttcgttgtgggtgggtataggtcaga

SEQ ID NO: 1064 - DNA, 30 bp, Artificial Sequence
  Description of Artificial Sequence: Synthetic probe
ttgaggatcggagggttcgagagcgttaag

SEQ ID NO: 1065 - DNA, 22 bp, Artificial Sequence
  Description of Artificial Sequence: Synthetic primer
tacgaatcacccgagagttcaa

SEQ ID NO: 1066 - DNA, 22 bp, Artificial Sequence
  Description of Artificial Sequence: Synthetic primer
tctgacctatacccacccacaa

SEQ ID NO: 1067 - DNA, 46 bp, Artificial Sequence
  Description of Artificial Sequence: Synthetic primer
  Description of Combined DNA/RNA Molecule: Synthetic primer
tctgacctatacccacccacaactccgccatctacctcctgaactt

SEQ ID NO: 1068 - DNA, 27 bp, Artificial Sequence
  Description of Artificial Sequence: Synthetic primer
  Description of Combined DNA/RNA Molecule: Synthetic primer
ttagttcgcggaagttaggttcgggaa

SEQ ID NO: 1069 - DNA, 39 bp, Artificial Sequence
  Description of Artificial Sequence: Synthetic primer
  Description of Combined DNA/RNA Molecule: Synthetic primer
ggtgtcgtggttctttccaaataaacgctttacagcttc

SEQ ID NO: 1070 - DNA, 46 bp, Artificial Sequence
  Description of Artificial Sequence: Synthetic oligonucleotide
  Description of Combined DNA/RNA Molecule: Synthetic oligonucleotide
tctcataaacactccggccacagttaggttcgggagacagcgggac

SEQ ID NO: 1071 - DNA, 59 bp, Artificial Sequence
  Description of Artificial Sequence: Synthetic oligonucleotide
ggagtttattgtgttttcggatttatattttgttcgagggtggctcaataacgggcaga

SEQ ID NO: 1072 - DNA, 30 bp, Artificial Sequence
  Description of Artificial Sequence: Synthetic probe
ttagacagcggagtttattgtgttttcgga

SEQ ID NO: 1073 - DNA, 21 bp, Artificial Sequence
  Description of Artificial Sequence: Synthetic primer
tctcataaacactccggccac

SEQ ID NO: 1074 - DNA, 20 bp, Artificial Sequence
  Description of Artificial Sequence: Synthetic primer
tctgcccgttattgagccac

SEQ ID NO: 1075 - DNA, 48 bp, Artificial Sequence
  Description of Artificial Sequence: Synthetic primer
  Description of Combined DNA/RNA Molecule: Synthetic primer
tctgcccgttattgagccacgctttacaaaaatccgacccctgaacag

SEQ ID NO: 1076 - DNA, 27 bp, Artificial Sequence
  Description of Artificial Sequence: Synthetic primer
  Description of Combined DNA/RNA Molecule: Synthetic primer
ggaagagtttgtagaggaggtcgtcgg

SEQ ID NO: 1077 - DNA, 39 bp, Artificial Sequence
  Description of Artificial Sequence: Synthetic primer
  Description of Combined DNA/RNA Molecule: Synthetic primer
ggtgtcgtggaacataaccttctccgatctactcatctc

SEQ ID NO: 1078 - DNA, 49 bp, Artificial Sequence
  Description of Artificial Sequence: Synthetic oligonucleotide
  Description of Combined DNA/RNA Molecule: Synthetic oligonucleotide
ttgattgggatcgttcgcacggaggtcgtcgaagttttaggatcggtgc

SEQ ID NO: 1079 - DNA, 55 bp, Artificial Sequence
  Description of Artificial Sequence: Synthetic oligonucleotide
ggtattgttagaggcgaacgaggtttagaggtatggtggctcaataacgggcaga

SEQ ID NO: 1080 - DNA, 32 bp, Artificial Sequence
  Description of Artificial Sequence: Synthetic probe
tttaggatcggtattgttagaggcgaacgagg

SEQ ID NO: 1081 - DNA, 20 bp, Artificial Sequence
  Description of Artificial Sequence: Synthetic primer
ttgattgggatcgttcgcac

SEQ ID NO: 1082 - DNA, 20 bp, Artificial Sequence
  Description of Artificial Sequence: Synthetic primer
tctgcccgttattgagccac

SEQ ID NO: 1083 - DNA, 32 bp, Artificial Sequence
  Description of Artificial Sequence: Synthetic primer
  Description of Combined DNA/RNA Molecule: Synthetic primer
gtttattttttcgggttttttttaagcgttta

SEQ ID NO: 1084 - DNA, 31 bp, Artificial Sequence
  Description of Artificial Sequence: Synthetic primer
  Description of Combined DNA/RNA Molecule: Synthetic primer
ggtgtcgtgggcaaaatctccccgccuccgt

SEQ ID NO: 1085 - DNA, 60 bp, Artificial Sequence
  Description of Artificial Sequence: Synthetic oligonucleotide
  Description of Combined DNA/RNA Molecule: Synthetic oligonucleotide
tctgcccaaaatactgcacaagtttggagttattaggaatgtattaacggttctcggaaa

SEQ ID NO: 1086 - DNA, 52 bp, Artificial Sequence
  Description of Artificial Sequence: Synthetic oligonucleotide
ggagggaggacgaggcggagagttatttaagttgaaactgaggcggtgttca

SEQ ID NO: 1087 - DNA, 25 bp, Artificial Sequence
  Description of Artificial Sequence: Synthetic probe
ttggttctcggagggaggacgaggc

SEQ ID NO: 1088 - DNA, 21 bp, Artificial Sequence
  Description of Artificial Sequence: Synthetic primer
tctgcccaaaatactgcacaa

SEQ ID NO: 1089 - DNA, 21 bp, Artificial Sequence
  Description of Artificial Sequence: Synthetic primer
tgaacaccgcctcagtttcaa

SEQ ID NO: 1090 - DNA, 45 bp, Artificial Sequence
  Description of Artificial Sequence: Synthetic primer
  Description of Combined DNA/RNA Molecule: Synthetic primer
tgaacaccgcctcagtttcaacaaaatctccccgcctctgccact

SEQ ID NO: 1091 - DNA, 20 bp, Artificial Sequence
  Description of Artificial Sequence: Synthetic primer
  Description of Combined DNA/RNA Molecule: Synthetic primer
tagcgggtgggaggcgattg

SEQ ID NO: 1092 - DNA, 34 bp, Artificial Sequence
  Description of Artificial Sequence: Synthetic primer
  Description of Combined DNA/RNA Molecule: Synthetic primer
ggtgtcgtggtaaaaccccaccgcgataaaaaat

SEQ ID NO: 1093 - DNA, 43 bp, Artificial Sequence
  Description of Artificial Sequence: Synthetic oligonucleotide
  Description of Combined DNA/RNA Molecule: Synthetic oligonucleotide
tatggactgtaccagcccaagggaggcgattagggagcgggca

SEQ ID NO: 1094 - DNA, 48 bp, Artificial Sequence
  Description of Artificial Sequence: Synthetic oligonucleotide
gggtgggaatagagggacgtttttcgtttgaaactgaggcggtgttca

SEQ ID NO: 1095 - DNA, 24 bp, Artificial Sequence
  Description of Artificial Sequence: Synthetic probe
aaagggagcgggtgggaatagagg

SEQ ID NO: 1096 - DNA, 20 bp, Artificial Sequence
  Description of Artificial Sequence: Synthetic primer
tatggactgtaccagcccaa

SEQ ID NO: 1097 - DNA, 21 bp, Artificial Sequence
  Description of Artificial Sequence: Synthetic primer
tgaacaccgcctcagtttcaa

SEQ ID NO: 1098 - DNA, 51 bp, Artificial Sequence
  Description of Artificial Sequence: Synthetic primer
  Description of Combined DNA/RNA Molecule: Synthetic primer
tgaacaccgcctcagtttcaaccaccgcgataaaaaacgaaaaatgucccc

SEQ ID NO: 1099 - DNA, 26 bp, Artificial Sequence
  Description of Artificial Sequence: Synthetic primer
  Description of Combined DNA/RNA Molecule: Synthetic primer
cgtttttgggagtgtatgtgcgttgc

SEQ ID NO: 1100 - DNA, 30 bp, Artificial Sequence
  Description of Artificial Sequence: Synthetic primer
  Description of Combined DNA/RNA Molecule: Synthetic primer
ggtgtcgtggcgccgcgaaaccgaaaactg

SEQ ID NO: 1101 - DNA, 48 bp, Artificial Sequence
  Description of Artificial Sequence: Synthetic oligonucleotide
  Description of Combined DNA/RNA Molecule: Synthetic oligonucleotide
tttgcctcttgtaggtgccaggagtgtatgtgcgttgttgggcgtgac

SEQ ID NO: 1102 - DNA, 45 bp, Artificial Sequence
  Description of Artificial Sequence: Synthetic oligonucleotide
gtggtttgagttcggttagcggtcggtgggcaacgcggatattca

SEQ ID NO: 1103 - DNA, 29 bp, Artificial Sequence
  Description of Artificial Sequence: Synthetic probe
aagttgggcgtggtttgagttcggttagc

SEQ ID NO: 1104 - DNA, 20 bp, Artificial Sequence
  Description of Artificial Sequence: Synthetic primer
tttgcctcttgtaggtgcca

SEQ ID NO: 1105 - DNA, 19 bp, Artificial Sequence
  Description of Artificial Sequence: Synthetic primer
tgaatatccgcgttgccca

SEQ ID NO: 1106 - DNA, 45 bp, Artificial Sequence
  Description of Artificial Sequence: Synthetic primer
  Description of Combined DNA/RNA Molecule: Synthetic primer
tgaatatccgcgttgcccagaaaactaccaccgacgcctgaccgt

SEQ ID NO: 1107 - DNA, 26 bp, Artificial Sequence
  Description of Artificial Sequence: Synthetic primer
  Description of Combined DNA/RNA Molecule: Synthetic primer
ttcggtttggttagttttcgcggttc

SEQ ID NO: 1108 - DNA, 35 bp, Artificial Sequence
  Description of Artificial Sequence: Synthetic primer
  Description of Combined DNA/RNA Molecule: Synthetic primer
ggtgtcgtggcgacgaatactcaccgaaacuaaag

SEQ ID NO: 1109 - DNA, 48 bp, Artificial Sequence
  Description of Artificial Sequence: Synthetic oligonucleotide
  Description of Combined DNA/RNA Molecule: Synthetic oligonucleotide
tgtcgcccggtagcaataaaccgcggtttttgttcgggttaacgttcg

SEQ ID NO: 1110 - DNA, 60 bp, Artificial Sequence
  Description of Artificial Sequence: Synthetic oligonucleotide
gtttaggaatgtggtcgacgagaagttttaatagtacggtttccgcgatctttgcattca

SEQ ID NO: 1111 - DNA, 32 bp, Artificial Sequence
  Description of Artificial Sequence: Synthetic probe
ttggttaacgtttaggaatgtggtcgacgaga

SEQ ID NO: 1112 - DNA, 21 bp, Artificial Sequence
  Description of Artificial Sequence: Synthetic primer
tgtcgcccggtagcaataaac

SEQ ID NO: 1113 - DNA, 22 bp, Artificial Sequence
  Description of Artificial Sequence: Synthetic primer
tgaatgcaaagatcgcggaaac

SEQ ID NO: 1114 - DNA, 50 bp, Artificial Sequence
  Description of Artificial Sequence: Synthetic primer
  Description of Combined DNA/RNA Molecule: Synthetic primer
tgaatgcaaagatcgcggaaacaccgaaactaaaaaaccacgctguactg

SEQ ID NO: 1115 - DNA, 31 bp, Artificial Sequence
  Description of Artificial Sequence: Synthetic primer
  Description of Combined DNA/RNA Molecule: Synthetic primer
gcggtgtataaaatatacgttgtttcgggag

SEQ ID NO: 1116 - DNA, 39 bp, Artificial Sequence
  Description of Artificial Sequence: Synthetic primer
  Description of Combined DNA/RNA Molecule: Synthetic primer
ggtgtcgtggatttaaaaacccaaacgaccctacctaag

SEQ ID NO: 1117 - DNA, 46 bp, Artificial Sequence
  Description of Artificial Sequence: Synthetic oligonucleotide
  Description of Combined DNA/RNA Molecule: Synthetic oligonucleotide
tgtgcactagtccacgtgaaaccgggaattgcgagaggaacgcgac

SEQ ID NO: 1118 - DNA, 50 bp, Artificial Sequence
  Description of Artificial Sequence: Synthetic oligonucleotide
gcggtgggagatattcgaggatagaagggtttccgcgatctttgcattca

SEQ ID NO: 1119 - DNA, 26 bp, Artificial Sequence
  Description of Artificial Sequence: Synthetic probe
ttgaggaacgcggtgggagatattcg

SEQ ID NO: 1120 - DNA, 22 bp, Artificial Sequence
  Description of Artificial Sequence: Synthetic primer
tgtgcactagtccacgtgaaac

SEQ ID NO: 1121 - DNA, 22 bp, Artificial Sequence
  Description of Artificial Sequence: Synthetic primer
tgaatgcaaagatcgcggaaac

SEQ ID NO: 1122 - DNA, 50 bp, Artificial Sequence
  Description of Artificial Sequence: Synthetic primer
  Description of Combined DNA/RNA Molecule: Synthetic primer
tgaatgcaaagatcgcggaaaccccaaacgaccctacctaaaatgacaag

SEQ ID NO: 1123 - DNA, 28 bp, Artificial Sequence
  Description of Artificial Sequence: Synthetic primer
  Description of Combined DNA/RNA Molecule: Synthetic primer
ttacgtatgagatcgttaaaggcgtagc

SEQ ID NO: 1124 - DNA, 31 bp, Artificial Sequence
  Description of Artificial Sequence: Synthetic primer
  Description of Combined DNA/RNA Molecule: Synthetic primer
ggtgtcgtggacgcacaaccgcgatcuaact

SEQ ID NO: 1125 - DNA, 48 bp, Artificial Sequence
  Description of Artificial Sequence: Synthetic oligonucleotide
  Description of Combined DNA/RNA Molecule: Synthetic oligonucleotide
tacagatacggacgggaatcaagtttatgggtgggcggaaatcgagta

SEQ ID NO: 1126 - DNA, 53 bp, Artificial Sequence
  Description of Artificial Sequence: Synthetic oligonucleotide
gagcgtgggtattaagtcggtagtggagtagttgtttacatcctcctgcgtca

SEQ ID NO: 1127 - DNA, 32 bp, Artificial Sequence
  Description of Artificial Sequence: Synthetic probe
aaggaaatcgagcgtgggtattaagtcggtag

SEQ ID NO: 1128 - DNA, 22 bp, Artificial Sequence
  Description of Artificial Sequence: Synthetic primer
tacagatacggacgggaatcaa

SEQ ID NO: 1129 - DNA, 22 bp, Artificial Sequence
  Description of Artificial Sequence: Synthetic primer
tgacgcaggaggatgtaaacaa

SEQ ID NO: 1130 - DNA, 53 bp, Artificial Sequence
  Description of Artificial Sequence: Synthetic primer
  Description of Combined DNA/RNA Molecule: Synthetic primer
tgacgcaggaggatgtaaacaaacaaccgcgatctaaccttcataatgccctg

SEQ ID NO: 1131 - DNA, 24 bp, Artificial Sequence
  Description of Artificial Sequence: Synthetic primer
  Description of Combined DNA/RNA Molecule: Synthetic primer
gtttcgaaggttacgggacgagga

SEQ ID NO: 1132 - DNA, 37 bp, Artificial Sequence
  Description of Artificial Sequence: Synthetic primer
  Description of Combined DNA/RNA Molecule: Synthetic primer
ggtgtcgtggtacgactactacgaacccgataaacct

SEQ ID NO: 1133 - DNA, 46 bp, Artificial Sequence
  Description of Artificial Sequence: Synthetic oligonucleotide
  Description of Combined DNA/RNA Molecule: Synthetic oligonucleotide
ttggcgcaacggtttccaagcgggtgattaagtgtaggtgcgacaa

SEQ ID NO: 1134 - DNA, 45 bp, Artificial Sequence
  Description of Artificial Sequence: Synthetic oligonucleotide
gacgggttagggatcgggtcgggttgtttacatcctcctgcgtca

SEQ ID NO: 1135 - DNA, 26 bp, Artificial Sequence
  Description of Artificial Sequence: Synthetic probe
aataggtgcgacgggttagggatcgg

SEQ ID NO: 1136 - DNA, 19 bp, Artificial Sequence
  Description of Artificial Sequence: Synthetic primer
ttggcgcaacggtttccaa

SEQ ID NO: 1137 - DNA, 22 bp, Artificial Sequence
  Description of Artificial Sequence: Synthetic primer
tgacgcaggaggatgtaaacaa

SEQ ID NO: 1138 - DNA, 42 bp, Artificial Sequence
  Description of Artificial Sequence: Synthetic primer
  Description of Combined DNA/RNA Molecule: Synthetic primer
tgacgcaggaggatgtaaacaacgcacccccgacctgaccca

SEQ ID NO: 1139 - DNA, 26 bp, Artificial Sequence
  Description of Artificial Sequence: Synthetic primer
  Description of Combined DNA/RNA Molecule: Synthetic primer
gggtattgggagtttcgtttcgggaa

SEQ ID NO: 1140 - DNA, 37 bp, Artificial Sequence
  Description of Artificial Sequence: Synthetic primer
  Description of Combined DNA/RNA Molecule: Synthetic primer
ggtgtcgtggcctcaaaatttccaaacccgacucgag

SEQ ID NO: 1141 - DNA, 48 bp, Artificial Sequence
  Description of Artificial Sequence: Synthetic oligonucleotide
  Description of Combined DNA/RNA Molecule: Synthetic oligonucleotide
tttgcctcttgtaggtgccatcgggagagttgtttaaggatgcggagc

SEQ ID NO: 1142 - DNA, 44 bp, Artificial Sequence
  Description of Artificial Sequence: Synthetic oligonucleotide
ggaatcgggtgaggaggttagggagtgggcaacgcggatattca

SEQ ID NO: 1143 - DNA, 23 bp, Artificial Sequence
  Description of Artificial Sequence: Synthetic probe
ccaggatgcggaatcgggtgagg

SEQ ID NO: 1144 - DNA, 20 bp, Artificial Sequence
  Description of Artificial Sequence: Synthetic primer
tttgcctcttgtaggtgcca

SEQ ID NO: 1145 - DNA, 19 bp, Artificial Sequence
  Description of Artificial Sequence: Synthetic primer
tgaatatccgcgttgccca

SEQ ID NO: 1146 - DNA, 49 bp, Artificial Sequence
  Description of Artificial Sequence: Synthetic primer
  Description of Combined DNA/RNA Molecule: Synthetic primer
tgaatatccgcgttgcccacctcaaaatttccaaacccgacttgaactt

SEQ ID NO: 1147 - DNA, 23 bp, Artificial Sequence
  Description of Artificial Sequence: Synthetic primer
  Description of Combined DNA/RNA Molecule: Synthetic primer
gaggattgtagggtgcgcgggtg

SEQ ID NO: 1148 - DNA, 37 bp, Artificial Sequence
  Description of Artificial Sequence: Synthetic primer
  Description of Combined DNA/RNA Molecule: Synthetic primer
ggtgtcgtggacaaaccccacgaatataacaaaaacg

SEQ ID NO: 1149 - DNA, 51 bp, Artificial Sequence
  Description of Artificial Sequence: Synthetic oligonucleotide
  Description of Combined DNA/RNA Molecule: Synthetic oligonucleotide
tatcgcatcaaatggagagcaagattgtagggtgcgcgggtatctcgggcg

SEQ ID NO: 1150 - DNA, 47 bp, Artificial Sequence
  Description of Artificial Sequence: Synthetic oligonucleotide
gggtagtcgttagcggaggaagcggttgaccgctgttatacgttgca

SEQ ID NO: 1151 - DNA, 30 bp, Artificial Sequence
  Description of Artificial Sequence: Synthetic probe
ttgtatctcgggtagtcgttagcggaggaa

SEQ ID NO: 1152 - DNA, 22 bp, Artificial Sequence
  Description of Artificial Sequence: Synthetic primer
tatcgcatcaaatggagagcaa

SEQ ID NO: 1153 - DNA, 22 bp, Artificial Sequence
  Description of Artificial Sequence: Synthetic primer
tgcaacgtataacagcggtcaa

SEQ ID NO: 1154 - DNA, 57 bp, Artificial Sequence
  Description of Artificial Sequence: Synthetic primer
  Description of Combined DNA/RNA Molecule: Synthetic primer
tgcaacgtataacagcggtcaacaaaaacaacttccgaaaaaaacgaaactgcttct

SEQ ID NO: 1155 - DNA, 26 bp, Artificial Sequence
  Description of Artificial Sequence: Synthetic primer
  Description of Combined DNA/RNA Molecule: Synthetic primer
tgagtttgtgaatacggagacggtca

SEQ ID NO: 1156 - DNA, 38 bp, Artificial Sequence
  Description of Artificial Sequence: Synthetic primer
  Description of Combined DNA/RNA Molecule: Synthetic primer
ggtgtcgtggcttcatttattcccgcgaataacaaacg

SEQ ID NO: 1157 - DNA, 51 bp, Artificial Sequence
  Description of Artificial Sequence: Synthetic oligonucleotide
  Description of Combined DNA/RNA Molecule: Synthetic oligonucleotide
tcctagtacctacagtgggcaagaatacggagacggtcgaggactcgagtc

SEQ ID NO: 1158 - DNA, 56 bp, Artificial Sequence
  Description of Artificial Sequence: Synthetic oligonucleotide
gagataaggagttcgttcgttcggtttttttcggttgaccgctgttatacgttgca

SEQ ID NO: 1159 - DNA, 32 bp, Artificial Sequence
  Description of Artificial Sequence: Synthetic probe
ttaggactcgagataaggagttcgttcgttcg

SEQ ID NO: 1160 - DNA, 22 bp, Artificial Sequence
  Description of Artificial Sequence: Synthetic primer
tcctagtacctacagtgggcaa

SEQ ID NO: 1161 - DNA, 22 bp, Artificial Sequence
  Description of Artificial Sequence: Synthetic primer
tgcaacgtataacagcggtcaa

SEQ ID NO: 1162 - DNA, 50 bp, Artificial Sequence
  Description of Artificial Sequence: Synthetic primer
  Description of Combined DNA/RNA Molecule: Synthetic primer
tgcaacgtataacagcggtcaaccgcgaataacaaacacaacctgaaaag

SEQ ID NO: 1163 - DNA, 21 bp, Artificial Sequence
  Description of Artificial Sequence: Synthetic primer
  Description of Combined DNA/RNA Molecule: Synthetic primer
ggcgcggagtgttttcgaggc

SEQ ID NO: 1164 - DNA, 41 bp, Artificial Sequence
  Description of Artificial Sequence: Synthetic primer
  Description of Combined DNA/RNA Molecule: Synthetic primer
ggtgtcgtggcgcgaaataaataccgaaaaactaaaataag

SEQ ID NO: 1165 - DNA, 51 bp, Artificial Sequence
  Description of Artificial Sequence: Synthetic oligonucleotide
  Description of Combined DNA/RNA Molecule: Synthetic oligonucleotide
tgtgcactagtccacgtgaaacagtgttttcgaggttagcgagcgcgcgcc

SEQ ID NO: 1166 - DNA, 57 bp, Artificial Sequence
  Description of Artificial Sequence: Synthetic oligonucleotide
gcgttttttttcgttcgtcgttaggtttatttcgggtttccgcgatctttgcattca

SEQ ID NO: 1167 - DNA, 27 bp, Artificial Sequence
  Description of Artificial Sequence: Synthetic probe
ttcgagcgcgcgttttttttcgttcgt

SEQ ID NO: 1168 - DNA, 22 bp, Artificial Sequence
  Description of Artificial Sequence: Synthetic primer
tgtgcactagtccacgtgaaac

SEQ ID NO: 1169 - DNA, 22 bp, Artificial Sequence
  Description of Artificial Sequence: Synthetic primer
tgaatgcaaagatcgcggaaac

SEQ ID NO: 1170 - DNA, 67 bp, Artificial Sequence
  Description of Artificial Sequence: Synthetic primer
  Description of Combined DNA/RNA Molecule: Synthetic primer
tgaatgcaaagatcgcggaaacaataaataaacataataactaaaccgaaataaacctaatgacgag

SEQ ID NO: 1171 - DNA, 36 bp, Artificial Sequence; identical to SEQ ID NO: 265
  Description of Artificial Sequence: Synthetic primer
  Description of Combined DNA/RNA Molecule: Synthetic primer

SEQ ID NO: 1172 - DNA, 44 bp, Artificial Sequence; identical to SEQ ID NO: 266
  Description of Artificial Sequence: Synthetic primer
  Description of Combined DNA/RNA Molecule: Synthetic primer

SEQ ID NO: 1173 - DNA, 64 bp, Artificial Sequence; identical to SEQ ID NO: 267
  Description of Artificial Sequence: Synthetic oligonucleotide
  Description of Combined DNA/RNA Molecule: Synthetic oligonucleotide

SEQ ID NO: 1174 - DNA, 54 bp, Artificial Sequence; identical to SEQ ID NO: 268
  Description of Artificial Sequence: Synthetic oligonucleotide

SEQ ID NO: 1175 - DNA, 32 bp, Artificial Sequence; identical to SEQ ID NO: 269
  Description of Artificial Sequence: Synthetic probe

SEQ ID NO: 1176 - DNA, 21 bp, Artificial Sequence
  Description of Artificial Sequence: Synthetic primer
tcagacgcactaaacaggcaa

SEQ ID NO: 1177 - DNA, 19 bp, Artificial Sequence
  Description of Artificial Sequence: Synthetic primer
ttcacacgacgatccgcaa

SEQ ID NO: 1178 - DNA, 59 bp, Artificial Sequence; identical to SEQ ID NO: 272
  Description of Artificial Sequence: Synthetic primer
  Description of Combined DNA/RNA Molecule: Synthetic primer

SEQ ID NO: 1179 - DNA, 25 bp, Artificial Sequence
  Description of Artificial Sequence: Synthetic primer
  Description of Combined DNA/RNA Molecule: Synthetic primer
gtaacggagtcgcgtttttcgggac

SEQ ID NO: 1180 - DNA, 30 bp, Artificial Sequence
  Description of Artificial Sequence: Synthetic primer
  Description of Combined DNA/RNA Molecule: Synthetic primer
ggtgtcgtggcgcatccgacccgaaacgcg

SEQ ID NO: 1181 - DNA, 45 bp, Artificial Sequence
  Description of Artificial Sequence: Synthetic oligonucleotide
  Description of Combined DNA/RNA Molecule: Synthetic oligonucleotide
ttcttcacagtaccgccacacgaggtggttatcgggtcgcgtgac

SEQ ID NO: 1182 - DNA, 56 bp, Artificial Sequence
  Description of Artificial Sequence: Synthetic oligonucleotide
gtggttttcggtcggttttttgtattcgttgtttttgtgtgttgtctggtggtgca

SEQ ID NO: 1183 - DNA, 23 bp, Artificial Sequence
  Description of Artificial Sequence: Synthetic probe
aagggtcgcgtggttttcggtcg

SEQ ID NO: 1184 - DNA, 20 bp, Artificial Sequence
  Description of Artificial Sequence: Synthetic primer
ttcttcacagtaccgccaca

SEQ ID NO: 1185 - DNA, 19 bp, Artificial Sequence
  Description of Artificial Sequence: Synthetic primer
tgcaccaccagacaacaca

SEQ ID NO: 1186 - DNA, 47 bp, Artificial Sequence
  Description of Artificial Sequence: Synthetic primer
  Description of Combined DNA/RNA Molecule: Synthetic primer
tgcaccaccagacaacacaacccgaaacgcacaaaaacaatgaatat

SEQ ID NO: 1187 - DNA, 20 bp, Artificial Sequence
  Description of Artificial Sequence: Synthetic primer
  Description of Combined DNA/RNA Molecule: Synthetic primer
gtggtagtcgggcgcgtgaa

SEQ ID NO: 1188 - DNA, 37 bp, Artificial Sequence
  Description of Artificial Sequence: Synthetic primer
  Description of Combined DNA/RNA Molecule: Synthetic primer
ggtgtcgtggcgcctctaaactaaccgtacatctaca

SEQ ID NO: 1189 - DNA, 49 bp, Artificial Sequence
  Description of Artificial Sequence: Synthetic oligonucleotide
  Description of Combined DNA/RNA Molecule: Synthetic oligonucleotide
taccctcctagctccgtacagcggtaggttttgaggttgtcatcgagaa

SEQ ID NO: 1190 - DNA, 57 bp, Artificial Sequence
  Description of Artificial Sequence: Synthetic oligonucleotide
gagggtttttttattatcggtcggtttttaagttagcgtgtgttgtctggtggtgca

SEQ ID NO: 1191 - DNA, 35 bp, Artificial Sequence
  Description of Artificial Sequence: Synthetic probe
aatgtcatcgagggtttttttattatcggtcggtt

SEQ ID NO: 1192 - DNA, 20 bp, Artificial Sequence
  Description of Artificial Sequence: Synthetic primer
taccctcctagctccgtaca

SEQ ID NO: 1193 - DNA, 19 bp, Artificial Sequence
  Description of Artificial Sequence: Synthetic primer
tgcaccaccagacaacaca

SEQ ID NO: 1194 - DNA, 51 bp, Artificial Sequence
  Description of Artificial Sequence: Synthetic primer
  Description of Combined DNA/RNA Molecule: Synthetic primer
tgcaccaccagacaacacactaaactaaccgtacatctacgcaatgctaat

SEQ ID NO: 1195 - DNA, 21 bp, Artificial Sequence
  Description of Artificial Sequence: Synthetic primer
  Description of Combined DNA/RNA Molecule: Synthetic primer
cggtgggttggagagcgtgga

SEQ ID NO: 1196 - DNA, 36 bp, Artificial Sequence
  Description of Artificial Sequence: Synthetic primer
  Description of Combined DNA/RNA Molecule: Synthetic primer
ggtgtcgtggctcctcgaacaaacgaacaaauaaat

SEQ ID NO: 1197 - DNA, 49 bp, Artificial Sequence
  Description of Artificial Sequence: Synthetic oligonucleotide
  Description of Combined DNA/RNA Molecule: Synthetic oligonucleotide
tgaacgctcaaacacgtgaactgaggtgacggaatgttttgcgcgggag

SEQ ID NO: 1198 - DNA, 50 bp, Artificial Sequence
  Description of Artificial Sequence: Synthetic oligonucleotide
gaggatcgtaggttttcgagttgtagaggggttggcctgtaagcgttcca

SEQ ID NO: 1199 - DNA, 29 bp, Artificial Sequence
  Description of Artificial Sequence: Synthetic probe
cctttgcgcgaggatcgtaggttttcgag

SEQ ID NO: 1200 - DNA, 21 bp, Artificial Sequence
  Description of Artificial Sequence: Synthetic primer
tgaacgctcaaacacgtgaac

SEQ ID NO: 1201 - DNA, 20 bp, Artificial Sequence
  Description of Artificial Sequence: Synthetic primer
tggaacgcttacaggccaac

SEQ ID NO: 1202 - DNA, 51 bp, Artificial Sequence
  Description of Artificial Sequence: Synthetic primer
  Description of Combined DNA/RNA Molecule: Synthetic primer
tggaacgcttacaggccaacctcgaacaaacgaacaaataaacgtgctttg

SEQ ID NO: 1203 - DNA, 24 bp, Artificial Sequence
  Description of Artificial Sequence: Synthetic primer
  Description of Combined DNA/RNA Molecule: Synthetic primer
cgaacgttttgtggtaggcggtga

SEQ ID NO: 1204 - DNA, 34 bp, Artificial Sequence
  Description of Artificial Sequence: Synthetic primer
  Description of Combined DNA/RNA Molecule: Synthetic primer
ggtgtcgtggcccgaatcttccaacgaacuaaat

SEQ ID NO: 1205 - DNA, 49 bp, Artificial Sequence
  Description of Artificial Sequence: Synthetic oligonucleotide
  Description of Combined DNA/RNA Molecule: Synthetic oligonucleotide
tcctagtacctacagtgggcaagtggacgttgttgaaggtgggcgaggc

SEQ ID NO: 1206 - DNA, 59 bp, Artificial Sequence
  Description of Artificial Sequence: Synthetic oligonucleotide
gagatttcgaggttagtttttagtgttcgggagtaacttgaccgctgttatacgttgca

SEQ ID NO: 1207 - DNA, 32 bp, Artificial Sequence
  Description of Artificial Sequence: Synthetic probe
ttggtgggcgagatttcgaggttagtttttag

SEQ ID NO: 1208 - DNA, 22 bp, Artificial Sequence
  Description of Artificial Sequence: Synthetic primer
tcctagtacctacagtgggcaa

SEQ ID NO: 1209 - DNA, 22 bp, Artificial Sequence
  Description of Artificial Sequence: Synthetic primer
tgcaacgtataacagcggtcaa

SEQ ID NO: 1210 - DNA, 52 bp, Artificial Sequence
  Description of Artificial Sequence: Synthetic primer
  Description of Combined DNA/RNA Molecule: Synthetic primer
tgcaacgtataacagcggtcaatccaacgaactaaacgttactcctgaacat

SEQ ID NO: 1211 - DNA, 22 bp, Artificial Sequence
  Description of Artificial Sequence: Synthetic primer
  Description of Combined DNA/RNA Molecule: Synthetic primer
atacgtcgggtgaggacggaga

SEQ ID NO: 1212 - DNA, 33 bp, Artificial Sequence
  Description of Artificial Sequence: Synthetic primer
  Description of Combined DNA/RNA Molecule: Synthetic primer
ggtgtcgtggccgaactataccgcgctaactat

SEQ ID NO: 1213 - DNA, 49 bp, Artificial Sequence
  Description of Artificial Sequence: Synthetic oligonucleotide
  Description of Combined DNA/RNA Molecule: Synthetic oligonucleotide
tcgcaccggaattctgaccgtgaggacggaggtagtttttgctcggacg

SEQ ID NO: 1214 - DNA, 51 bp, Artificial Sequence
  Description of Artificial Sequence: Synthetic oligonucleotide
ggatagcgaaattcgcgaggtttaggagagcggtagtttcccatgacggca

SEQ ID NO: 1215 - DNA, 29 bp, Artificial Sequence
  Description of Artificial Sequence: Synthetic probe
aatttgctcggatagcgaaattcgcgagg

SEQ ID NO: 1216 - DNA, 19 bp, Artificial Sequence
  Description of Artificial Sequence: Synthetic primer
tcgcaccggaattctgacc

SEQ ID NO: 1217 - DNA, 20 bp, Artificial Sequence
  Description of Artificial Sequence: Synthetic primer
tgccgtcatgggaaactacc

SEQ ID NO: 1218 - DNA, 49 bp, Artificial Sequence
  Description of Artificial Sequence: Synthetic primer
  Description of Combined DNA/RNA Molecule: Synthetic primer
tgccgtcatgggaaactacccgaactataccgcgctaactactgctctt

SEQ ID NO: 1219 - DNA, 30 bp, Artificial Sequence
  Description of Artificial Sequence: Synthetic primer
  Description of Combined DNA/RNA Molecule: Synthetic primer
gttttttattagataagaggtcgtcggtta

SEQ ID NO: 1220 - DNA, 41 bp, Artificial Sequence
  Description of Artificial Sequence: Synthetic primer
  Description of Combined DNA/RNA Molecule: Synthetic primer
ggtgtcgtggcctaaaaacgaaaaacgaaaaacgaaaaaca

SEQ ID NO: 1221 - DNA, 50 bp, Artificial Sequence
  Description of Artificial Sequence: Synthetic oligonucleotide
  Description of Combined DNA/RNA Molecule: Synthetic oligonucleotide
ttgcacgttgtcctgcacccgtcggttggttgtcggttttataacgttta

SEQ ID NO: 1222 - DNA, 54 bp, Artificial Sequence
  Description of Artificial Sequence: Synthetic oligonucleotide
gttcgtggagttatttttcggtttcgggatttagggtagtttcccatgacggca

SEQ ID NO: 1223 - DNA, 35 bp, Artificial Sequence
  Description of Artificial Sequence: Synthetic probe
aattataacgttcgtggagttatttttcggtttcg

SEQ ID NO: 1224 - DNA, 19 bp, Artificial Sequence
  Description of Artificial Sequence: Synthetic primer
ttgcacgttgtcctgcacc

SEQ ID NO: 1225 - DNA, 20 bp, Artificial Sequence
  Description of Artificial Sequence: Synthetic primer
tgccgtcatgggaaactacc

SEQ ID NO: 1226 - DNA, 55 bp, Artificial Sequence
  Description of Artificial Sequence: Synthetic primer
  Description of Combined DNA/RNA Molecule: Synthetic primer
tgccgtcatgggaaactaccctaaaaacgaaaaacgaaaaacgaaaaatgaaacc

SEQ ID NO: 1227 - DNA, 27 bp, Artificial Sequence
  Description of Artificial Sequence: Synthetic primer
  Description of Combined DNA/RNA Molecule: Synthetic primer
tacgaggagacggagtagtttcgggaa

SEQ ID NO: 1228 - DNA, 42 bp, Artificial Sequence
  Description of Artificial Sequence: Synthetic primer
  Description of Combined DNA/RNA Molecule: Synthetic primer
ggtgtcgtggccaacgaaataaaattaaacctaacgaaaaag

SEQ ID NO: 1229 - DNA, 49 bp, Artificial Sequence
  Description of Artificial Sequence: Synthetic oligonucleotide
  Description of Combined DNA/RNA Molecule: Synthetic oligonucleotide
tgcttacccacgatgcaccacggagtagtttcgggagtagaatcggcac

SEQ ID NO: 1230 - DNA, 46 bp, Artificial Sequence
  Description of Artificial Sequence: Synthetic oligonucleotide
ggcgttcgtcgagttaggtgggtttcggtcgtatgacttgctcgca

SEQ ID NO: 1231 - DNA, 30 bp, Artificial Sequence
  Description of Artificial Sequence: Synthetic probe
tttagaatcggcgttcgtcgagttaggtgg

SEQ ID NO: 1232 - DNA, 19 bp, Artificial Sequence
  Description of Artificial Sequence: Synthetic primer
tgcttacccacgatgcacc

SEQ ID NO: 1233 - DNA, 20 bp, Artificial Sequence
  Description of Artificial Sequence: Synthetic primer
tgcgagcaagtcatacgacc

SEQ ID NO: 1234 - DNA, 57 bp, Artificial Sequence
  Description of Artificial Sequence: Synthetic primer
  Description of Combined DNA/RNA Molecule: Synthetic primer
tgcgagcaagtcatacgaccaaaattaaacctaacgaaaaaaacgaaacctgaaact

SEQ ID NO: 1235 - DNA, 26 bp, Artificial Sequence
  Description of Artificial Sequence: Synthetic primer
  Description of Combined DNA/RNA Molecule: Synthetic primer
ttgggtgtttcgatttttcgcgtttc

SEQ ID NO: 1236 - DNA, 37 bp, Artificial Sequence
  Description of Artificial Sequence: Synthetic primer
  Description of Combined DNA/RNA Molecule: Synthetic primer
ggtgtcgtggaaaaacgtacataaaacgcgaaattag

SEQ ID NO: 1237 - DNA, 48 bp, Artificial Sequence
  Description of Artificial Sequence: Synthetic oligonucleotide
  Description of Combined DNA/RNA Molecule: Synthetic oligonucleotide
tagccgatggcgtaaaaccgcgtttttcgttgttgcgaagatcgtggc

SEQ ID NO: 1238 - DNA, 53 bp, Artificial Sequence
  Description of Artificial Sequence: Synthetic oligonucleotide
gtggttttcgtttgtatatcgcgtttaggttcgggtcgtatgacttgctcgca

SEQ ID NO: 1239 - DNA, 35 bp, Artificial Sequence
  Description of Artificial Sequence: Synthetic probe
ttgaagatcgtggttttcgtttgtatatcgcgttt

SEQ ID NO: 1240 - DNA, 19 bp, Artificial Sequence
  Description of Artificial Sequence: Synthetic primer
tagccgatggcgtaaaacc

SEQ ID NO: 1241 - DNA, 20 bp, Artificial Sequence
  Description of Artificial Sequence: Synthetic primer
tgcgagcaagtcatacgacc

SEQ ID NO: 1242 - DNA, 55 bp, Artificial Sequence
  Description of Artificial Sequence: Synthetic primer
  Description of Combined DNA/RNA Molecule: Synthetic primer
tgcgagcaagtcatacgaccgtacataaaacgcgaaattaaaaaccactgaaccc

SEQ ID NO: 1243 - DNA, 21 bp, Artificial Sequence
  Description of Artificial Sequence: Synthetic primer
  Description of Combined DNA/RNA Molecule: Synthetic primer
cgaggttagggcgagcgggca

SEQ ID NO: 1244 - DNA, 31 bp, Artificial Sequence
  Description of Artificial Sequence: Synthetic primer
  Description of Combined DNA/RNA Molecule: Synthetic primer
ggtgtcgtggcctccgaccgacccaaaatag

SEQ ID NO: 1245 - DNA, 46 bp, Artificial Sequence
  Description of Artificial Sequence: Synthetic oligonucleotide
  Description of Combined DNA/RNA Molecule: Synthetic oligonucleotide
tacgaatcacccgagagttcaacgagcgagtcggagtgggcgttgg

SEQ ID NO: 1246 - DNA, 49 bp, Artificial Sequence
  Description of Artificial Sequence: Synthetic oligonucleotide
gttaagtgagaggtcgcgcgtaagtcgttgtgggtgggtataggtcaga

SEQ ID NO: 1247 - DNA, 26 bp, Artificial Sequence
  Description of Artificial Sequence: Synthetic probe
ttagtgggcgttaagtgagaggtcgc

SEQ ID NO: 1248 - DNA, 22 bp, Artificial Sequence
  Description of Artificial Sequence: Synthetic primer
tacgaatcacccgagagttcaa

SEQ ID NO: 1249 - DNA, 22 bp, Artificial Sequence
  Description of Artificial Sequence: Synthetic primer
tctgacctatacccacccacaa

SEQ ID NO: 1250 - DNA, 54 bp, Artificial Sequence
  Description of Artificial Sequence: Synthetic primer
  Description of Combined DNA/RNA Molecule: Synthetic primer
tctgacctatacccacccacaagacccaaaataactacgaacgcctatgacttg

SEQ ID NO: 1251 - DNA, 22 bp, Artificial Sequence
  Description of Artificial Sequence: Synthetic primer
  Description of Combined DNA/RNA Molecule: Synthetic primer
cgtcgttttttgggcgcgggtc

SEQ ID NO: 1252 - DNA, 37 bp, Artificial Sequence
  Description of Artificial Sequence: Synthetic primer
  Description of Combined DNA/RNA Molecule: Synthetic primer
ggtgtcgtggctaaaacccgaataaccgctaaaaaat

SEQ ID NO: 1253 - DNA, 39 bp, Artificial Sequence
  Description of Artificial Sequence: Synthetic oligonucleotide
  Description of Combined DNA/RNA Molecule: Synthetic oligonucleotide
ttcgcctaccgcagtgaacgggcgcgggttaagcgggag

SEQ ID NO: 1254 - DNA, 39 bp, Artificial Sequence
  Description of Artificial Sequence: Synthetic oligonucleotide
ggagaggagggaggcgtttcgttgagacatgggctcgca

SEQ ID NO: 1255 - DNA, 23 bp, Artificial Sequence
  Description of Artificial Sequence: Synthetic probe
ttgttaagcggagaggagggagg

SEQ ID NO: 1256 - DNA, 19 bp, Artificial Sequence
  Description of Artificial Sequence: Synthetic primer
ttcgcctaccgcagtgaac

SEQ ID NO: 1257 - DNA, 19 bp, Artificial Sequence
  Description of Artificial Sequence: Synthetic primer
tgcgagcccatgtctcaac

SEQ ID NO: 1258 - DNA, 48 bp, Artificial Sequence
  Description of Artificial Sequence: Synthetic primer
  Description of Combined DNA/RNA Molecule: Synthetic primer
tgcgagcccatgtctcaacaatcctaaacacacgaccgaaatgcccct

SEQ ID NO: 1259 - DNA, 23 bp, Artificial Sequence
  Description of Artificial Sequence: Synthetic primer
  Description of Combined DNA/RNA Molecule: Synthetic primer
gcgaattaggtcgttggcggaga

SEQ ID NO: 1260 - DNA, 37 bp, Artificial Sequence
  Description of Artificial Sequence: Synthetic primer
  Description of Combined DNA/RNA Molecule: Synthetic primer
ggtgtcgtggcacctacaaaacgaacaacgaccgatc

SEQ ID NO: 1261 - DNA, 46 bp, Artificial Sequence
  Description of Artificial Sequence: Synthetic oligonucleotide
  Description of Combined DNA/RNA Molecule: Synthetic oligonucleotide
ttgcatttcgttagcgacacatttaggaggagcgtagaagcgacaa

SEQ ID NO: 1262 - DNA, 56 bp, Artificial Sequence
  Description of Artificial Sequence: Synthetic oligonucleotide
gacggtttttatgtcggcggttaatatgatggagaatgtgagtcgatctacccgca

SEQ ID NO: 1263 - DNA, 32 bp, Artificial Sequence
  Description of Artificial Sequence: Synthetic probe
tttagaagcgacggtttttatgtcggcggtta

SEQ ID NO: 1264 - DNA, 21 bp, Artificial Sequence
  Description of Artificial Sequence: Synthetic primer
ttgcatttcgttagcgacaca

SEQ ID NO: 1265 - DNA, 20 bp, Artificial Sequence
  Description of Artificial Sequence: Synthetic primer
tgcgggtagatcgactcaca

SEQ ID NO: 1266 - DNA, 49 bp, Artificial Sequence
  Description of Artificial Sequence: Synthetic primer
  Description of Combined DNA/RNA Molecule: Synthetic primer
tgcgggtagatcgactcacacacctacaaaacgaacaacgactgattcc

SEQ ID NO: 1267 - DNA, 31 bp, Artificial Sequence
  Description of Artificial Sequence: Synthetic primer
  Description of Combined DNA/RNA Molecule: Synthetic primer
gaataaagcgattcggttttttattcgggag

SEQ ID NO: 1268 - DNA, 38 bp, Artificial Sequence
  Description of Artificial Sequence: Synthetic primer
  Description of Combined DNA/RNA Molecule: Synthetic primer
ggtgtcgtggcctcctactaactaacgaccctauaaag

SEQ ID NO: 1269 - DNA, 54 bp, Artificial Sequence
  Description of Artificial Sequence: Synthetic oligonucleotide
  Description of Combined DNA/RNA Molecule: Synthetic oligonucleotide
ttgcatttcgttagcgacacagttttttattcgaggattgggttgtctcgtgca

SEQ ID NO: 1270 - DNA, 53 bp, Artificial Sequence
  Description of Artificial Sequence: Synthetic oligonucleotide
gtgtgattggtcggaggagttatatggtgaaagtgtgagtcgatctacccgca

SEQ ID NO: 1271 - DNA, 34 bp, Artificial Sequence
  Description of Artificial Sequence: Synthetic probe
ttttgtctcgtgtgattggtcggaggagttatat

SEQ ID NO: 1272 - DNA, 21 bp, Artificial Sequence
  Description of Artificial Sequence: Synthetic primer
ttgcatttcgttagcgacaca

SEQ ID NO: 1273 - DNA, 20 bp, Artificial Sequence
  Description of Artificial Sequence: Synthetic primer
tgcgggtagatcgactcaca

SEQ ID NO: 1274 - DNA, 25 bp, Artificial Sequence
  Description of Artificial Sequence: Synthetic primer
  Description of Combined DNA/RNA Molecule: Synthetic primer
gaggaagggaaaggtggtacggatc

SEQ ID NO: 1275 - DNA, 44 bp, Artificial Sequence
  Description of Artificial Sequence: Synthetic primer
  Description of Combined DNA/RNA Molecule: Synthetic primer
ggtgtcgtggcttaacgataaaaataaaaacgaaaacgcgcgat

SEQ ID NO: 1276 - DNA, 53 bp, Artificial Sequence
  Description of Artificial Sequence: Synthetic oligonucleotide
  Description of Combined DNA/RNA Molecule: Synthetic oligonucleotide
taccactcatcttctgcgacagtggtacggattttaagggagggactcggaac

SEQ ID NO: 1277 - DNA, 64 bp, Artificial Sequence
  Description of Artificial Sequence: Synthetic oligonucleotide
ggagttaatagatttgattttttcgagtttgtagtttttagtcgtgtgagtcgatctacccgca

SEQ ID NO: 1278 - DNA, 40 bp, Artificial Sequence
  Description of Artificial Sequence: Synthetic probe
ttgggactcggagttaatagatttgattttttcgagtttg

SEQ ID NO: 1279 - DNA, 21 bp, Artificial Sequence
  Description of Artificial Sequence: Synthetic primer
taccactcatcttctgcgaca

SEQ ID NO: 1280 - DNA, 20 bp, Artificial Sequence
  Description of Artificial Sequence: Synthetic primer
tgcgggtagatcgactcaca

SEQ ID NO: 1281 - DNA, 52 bp, Artificial Sequence
  Description of Artificial Sequence: Synthetic primer
  Description of Combined DNA/RNA Molecule: Synthetic primer
tgcgggtagatcgactcacacgataaaaataaaaacgaaaacgcgtgactag

SEQ ID NO: 1282 - DNA, 25 bp, Artificial Sequence
  Description of Artificial Sequence: Synthetic primer
  Description of Combined DNA/RNA Molecule: Synthetic primer
tgggaggtttaattacgggcgagag

SEQ ID NO: 1283 - DNA, 43 bp, Artificial Sequence
  Description of Artificial Sequence: Synthetic primer
  Description of Combined DNA/RNA Molecule: Synthetic primer
ggtgtcgtggcccaaaatactaaaattacaaacgtaaacctct

SEQ ID NO: 1284 - DNA, 54 bp, Artificial Sequence
  Description of Artificial Sequence: Synthetic oligonucleotide
  Description of Combined DNA/RNA Molecule: Synthetic oligonucleotide
tctcatgggcgctagtatcaacgggcgagaaaattgaggtatttttcacgttcc

SEQ ID NO: 1285 - DNA, 60 bp, Artificial Sequence
  Description of Artificial Sequence: Synthetic oligonucleotide
gtttttttcgaaaataaaagaaaggatgtcgggtacgggtttccctgattgatacccgca

SEQ ID NO: 1286 - DNA, 41 bp, Artificial Sequence
  Description of Artificial Sequence: Synthetic probe
ccttttcacgtttttttcgaaaataaaagaaaggatgtcgg

SEQ ID NO: 1287 - DNA, 22 bp, Artificial Sequence
  Description of Artificial Sequence: Synthetic primer
tctcatgggcgctagtatcaac

SEQ ID NO: 1288 - DNA, 22 bp, Artificial Sequence
  Description of Artificial Sequence: Synthetic primer
tgcgggtatcaatcagggaaac

SEQ ID NO: 1289 - DNA, 56 bp, Artificial Sequence
  Description of Artificial Sequence: Synthetic primer
  Description of Combined DNA/RNA Molecule: Synthetic primer
tgcgggtatcaatcagggaaacaatactaaaattacaaacgtaaaccgctguacct

SEQ ID NO: 1290 - DNA, 22 bp, Artificial Sequence
  Description of Artificial Sequence: Synthetic primer
  Description of Combined DNA/RNA Molecule: Synthetic primer
tggagaattcggagggcgatca

SEQ ID NO: 1291 - DNA, 30 bp, Artificial Sequence
  Description of Artificial Sequence: Synthetic primer
  Description of Combined DNA/RNA Molecule: Synthetic primer
ggtgtcgtggcctccgcccaccgtccccgt

SEQ ID NO: 1292 - DNA, 43 bp, Artificial Sequence
  Description of Artificial Sequence: Synthetic oligonucleotide
  Description of Combined DNA/RNA Molecule: Synthetic oligonucleotide
tggatcgagacggaatgcaactgtgagaggtcgcgcgcgttcc

SEQ ID NO: 1293 - DNA, 47 bp, Artificial Sequence
  Description of Artificial Sequence: Synthetic oligonucleotide
gttttttggcgtcgggttcgttggggtttccctgattgatacccgca

SEQ ID NO: 1294 - DNA, 22 bp, Artificial Sequence
  Description of Artificial Sequence: Synthetic probe
aacgcgcgcgttttttggcgtc

SEQ ID NO: 1295 - DNA, 21 bp, Artificial Sequence
  Description of Artificial Sequence: Synthetic primer
tggatcgagacggaatgcaac

SEQ ID NO: 1296 - DNA, 22 bp, Artificial Sequence
  Description of Artificial Sequence: Synthetic primer
tgcgggtatcaatcagggaaac

SEQ ID NO: 1297 - DNA, 42 bp, Artificial Sequence
  Description of Artificial Sequence: Synthetic primer
  Description of Combined DNA/RNA Molecule: Synthetic primer
tgcgggtatcaatcagggaaacccaccccgcccaatgaacct

SEQ ID NO: 1298 - DNA, 31 bp, Artificial Sequence
  Description of Artificial Sequence: Synthetic primer
  Description of Combined DNA/RNA Molecule: Synthetic primer
gttttgttgggtagtttcgaatattcgttac

SEQ ID NO: 1299 - DNA, 35 bp, Artificial Sequence
  Description of Artificial Sequence: Synthetic primer
  Description of Combined DNA/RNA Molecule: Synthetic primer
ggtgtcgtggcccccctaatttctcgtcacuccct

SEQ ID NO: 1300 - DNA, 57 bp, Artificial Sequence
  Description of Artificial Sequence: Synthetic oligonucleotide
  Description of Combined DNA/RNA Molecule: Synthetic oligonucleotide
tcctgagggacaaatacacaccagtttcgaatattcgttattttagggatacgtata

SEQ ID NO: 1301 - DNA, 52 bp, Artificial Sequence
  Description of Artificial Sequence: Synthetic oligonucleotide
gtacgggttcgtgttttgagtttttggaaggggtaggtaaggaagtcacgca

SEQ ID NO: 1302 - DNA, 32 bp, Artificial Sequence
  Description of Artificial Sequence: Synthetic probe
aagggatacgtacgggttcgtgttttgagttt

SEQ ID NO: 1303 - DNA, 22 bp, Artificial Sequence
  Description of Artificial Sequence: Synthetic primer
tcctgagggacaaatacacacc

SEQ ID NO: 1304 - DNA, 21 bp, Artificial Sequence
  Description of Artificial Sequence: Synthetic primer
tgcgtgacttccttacctacc

SEQ ID NO: 1305 - DNA, 49 bp, Artificial Sequence
  Description of Artificial Sequence: Synthetic primer
  Description of Combined DNA/RNA Molecule: Synthetic primer
tgcgtgacttccttacctaccccctaatttctcgtcactccctgaaact

SEQ ID NO: 1306 - DNA, 30 bp, Artificial Sequence
  Description of Artificial Sequence: Synthetic primer
  Description of Combined DNA/RNA Molecule: Synthetic primer
gtagacgttttttttttaggaggtcggaac

SEQ ID NO: 1307 - DNA, 31 bp, Artificial Sequence
  Description of Artificial Sequence: Synthetic primer
  Description of Combined DNA/RNA Molecule: Synthetic primer
ggtgtcgtggctcaccgaccctcgcaacgac

SEQ ID NO: 1308 - DNA, 57 bp, Artificial Sequence
  Description of Artificial Sequence: Synthetic oligonucleotide
  Description of Combined DNA/RNA Molecule: Synthetic oligonucleotide
ttgcaacaggctaccgacccggaatttttgtttttattttttatcgggattcggtca

SEQ ID NO: 1309 - DNA, 69 bp, Artificial Sequence
  Description of Artificial Sequence: Synthetic oligonucleotide
ggttggttagaggtaagtttcgagattttttattaattattattatcgggtaggtaaggaagtcacgca

SEQ ID NO: 1310 - DNA, 35 bp, Artificial Sequence
  Description of Artificial Sequence: Synthetic probe
aagggattcggttggttagaggtaagtttcgagat

SEQ ID NO: 1311 - DNA, 19 bp, Artificial Sequence
  Description of Artificial Sequence: Synthetic primer
ttgcaacaggctaccgacc

SEQ ID NO: 1312 - DNA, 21 bp, Artificial Sequence
  Description of Artificial Sequence: Synthetic primer
tgcgtgacttccttacctacc

SEQ ID NO: 1313 - DNA, 45 bp, Artificial Sequence
  Description of Artificial Sequence: Synthetic primer
  Description of Combined DNA/RNA Molecule: Synthetic primer
tgcgtgacttccttacctaccctcaccgaccctcgcaatgataac

SEQ ID NO: 1314 - DNA, 27 bp, Artificial Sequence
  Description of Artificial Sequence: Synthetic primer
  Description of Combined DNA/RNA Molecule: Synthetic primer
ggtttttcgttcgaggaatttcgggaa

SEQ ID NO: 1315 - DNA, 41 bp, Artificial Sequence
  Description of Artificial Sequence: Synthetic primer
  Description of Combined DNA/RNA Molecule: Synthetic primer
ggtgtcgtggaactaaacatccaaattaaatctcgauttag

SEQ ID NO: 1316 - DNA, 52 bp, Artificial Sequence
  Description of Artificial Sequence: Synthetic oligonucleotide
  Description of Combined DNA/RNA Molecule: Synthetic oligonucleotide
taagcctgcttttccgaaacaaggttagggaagtaagatgtcggatcgttcg

SEQ ID NO: 1317 - DNA, 65 bp, Artificial Sequence
  Description of Artificial Sequence: Synthetic oligonucleotide
tttaaaaaattttcgaaacgaactacgaaataaaaaaaataaacttgtattgcgccaggatagca

SEQ ID NO: 1318 - DNA, 42 bp, Artificial Sequence
  Description of Artificial Sequence: Synthetic probe
aatcggatcgtttattttttttatttcgtagttcgtttcgaa

SEQ ID NO: 1319 - DNA, 22 bp, Artificial Sequence
  Description of Artificial Sequence: Synthetic primer
taagcctgcttttccgaaacaa

SEQ ID NO: 1320 - DNA, 21 bp, Artificial Sequence
  Description of Artificial Sequence: Synthetic primer
tgctatcctggcgcaatacaa

SEQ ID NO: 1321 - DNA, 27 bp, Artificial Sequence
  Description of Artificial Sequence: Synthetic primer
  Description of Combined DNA/RNA Molecule: Synthetic primer
aggttaggtcgttttttttcgcgtttc

SEQ ID NO: 1322 - DNA, 31 bp, Artificial Sequence
  Description of Artificial Sequence: Synthetic primer
  Description of Combined DNA/RNA Molecule: Synthetic primer
ggtgtcgtggcgcgccaaacccaaacaaaat

SEQ ID NO: 1323 - DNA, 51 bp, Artificial Sequence
  Description of Artificial Sequence: Synthetic oligonucleotide
  Description of Combined DNA/RNA Molecule: Synthetic oligonucleotide
ttggcaactctccacccaattttttcgcgtttttcgttttttcatcgttcc

SEQ ID NO: 1324 - DNA, 58 bp, Artificial Sequence
  Description of Artificial Sequence: Synthetic oligonucleotide
gttttcgttttcgagtcgagtttatcgtttgttgtagttgtattgcgccaggatagca

SEQ ID NO: 1325 - DNA, 36 bp, Artificial Sequence
  Description of Artificial Sequence: Synthetic probe
aatttcatcgttttcgttttcgagtcgagtttatcg

SEQ ID NO: 1326 - DNA, 19 bp, Artificial Sequence
  Description of Artificial Sequence: Synthetic primer
ttggcaactctccacccaa

SEQ ID NO: 1327 - DNA, 21 bp, Artificial Sequence
  Description of Artificial Sequence: Synthetic primer
tgctatcctggcgcaatacaa

SEQ ID NO: 1328 - DNA, 49 bp, Artificial Sequence
  Description of Artificial Sequence: Synthetic primer
  Description of Combined DNA/RNA Molecule: Synthetic primer
tgctatcctggcgcaatacaaccaaacccaaacaaaacatcgtgacttc

SEQ ID NO: 1329 - DNA, 20 bp, Artificial Sequence
  Description of Artificial Sequence: Synthetic primer
  Description of Combined DNA/RNA Molecule: Synthetic primer
gagttggcggagggcgttca

SEQ ID NO: 1330 - DNA, 33 bp, Artificial Sequence
  Description of Artificial Sequence: Synthetic primer
  Description of Combined DNA/RNA Molecule: Synthetic primer
ggtgtcgtgggcgaactctaaccccgaccctat

SEQ ID NO: 1331 - DNA, 52 bp, Artificial Sequence
  Description of Artificial Sequence: Synthetic oligonucleotide
  Description of Combined DNA/RNA Molecule: Synthetic oligonucleotide
tcgacgaatctgctcagacaagggattgtatttgttttcgtcggatcgttta

SEQ ID NO: 1332 - DNA, 52 bp, Artificial Sequence
  Description of Artificial Sequence: Synthetic oligonucleotide
gttcggttttatcggattcgtaggttttcgaggttgaagcagcgtctgagca

SEQ ID NO: 1333 - DNA, 33 bp, Artificial Sequence
  Description of Artificial Sequence: Synthetic probe
tttcggatcgttcggttttatcggattcgtagg

SEQ ID NO: 1334 - DNA, 21 bp, Artificial Sequence
  Description of Artificial Sequence: Synthetic primer
tcgacgaatctgctcagacaa

SEQ ID NO: 1335 - DNA, 19 bp, Artificial Sequence
  Description of Artificial Sequence: Synthetic primer
tgctcagacgctgcttcaa

SEQ ID NO: 1336 - DNA, 42 bp, Artificial Sequence
  Description of Artificial Sequence: Synthetic primer
  Description of Combined DNA/RNA Molecule: Synthetic primer
tgctcagacgctgcttcaaaaccccgaccctaccctgaaaat

SEQ ID NO: 1337 - DNA, 25 bp, Artificial Sequence
  Description of Artificial Sequence: Synthetic primer
  Description of Combined DNA/RNA Molecule: Synthetic primer
gggtatttaggagcggtagcggtac

SEQ ID NO: 1338 - DNA, 30 bp, Artificial Sequence
  Description of Artificial Sequence: Synthetic primer
  Description of Combined DNA/RNA Molecule: Synthetic primer
ggtgtcgtggatccgcacccccgaaaccgt

SEQ ID NO: 1339 - DNA, 50 bp, Artificial Sequence
  Description of Artificial Sequence: Synthetic oligonucleotide
  Description of Combined DNA/RNA Molecule: Synthetic oligonucleotide
tcgacgaatctgctcagacaagtagcggtatttgtagttgtcagcgtgcc

SEQ ID NO: 1340 - DNA, 53 bp, Artificial Sequence
  Description of Artificial Sequence: Synthetic oligonucleotide
gtgttggagttttacgaagattagttcgaggttcttgaagcagcgtctgagca

SEQ ID NO: 1341 - DNA, 36 bp, Artificial Sequence
  Description of Artificial Sequence: Synthetic probe
aatgtcagcgtgttggagttttacgaagattagttc

SEQ ID NO: 1342 - DNA, 21 bp, Artificial Sequence
  Description of Artificial Sequence: Synthetic primer
tcgacgaatctgctcagacaa

SEQ ID NO: 1343 - DNA, 19 bp, Artificial Sequence
  Description of Artificial Sequence: Synthetic primer
tgctcagacgctgcttcaa

SEQ ID NO: 1344 - DNA, 40 bp, Artificial Sequence
  Description of Artificial Sequence: Synthetic primer
  Description of Combined DNA/RNA Molecule: Synthetic primer
tgctcagacgctgcttcaaccccgaaaccgcgatgaaccc

SEQ ID NO: 1345 - DNA, 24 bp, Artificial Sequence
  Description of Artificial Sequence: Synthetic primer
  Description of Combined DNA/RNA Molecule: Synthetic primer
gcggagagttggtatttgcgttgg

SEQ ID NO: 1346 - DNA, 33 bp, Artificial Sequence
  Description of Artificial Sequence: Synthetic primer
  Description of Combined DNA/RNA Molecule: Synthetic primer
ggtgtcgtgggttcgccgctatcgtcaaatatg

SEQ ID NO: 1347 - DNA, 52 bp, Artificial Sequence
  Description of Artificial Sequence: Synthetic oligonucleotide
  Description of Combined DNA/RNA Molecule: Synthetic oligonucleotide
tttccgccgctacaaccaagagttttaggttggcgttgtcgttactcgtgct

SEQ ID NO: 1348 - DNA, 40 bp, Artificial Sequence
  Description of Artificial Sequence: Synthetic oligonucleotide
gtgtcgtcggtgtcggcggtcttgaagcagcgtctgagca

SEQ ID NO: 1349 - DNA, 26 bp, Artificial Sequence
  Description of Artificial Sequence: Synthetic probe
aagttactcgtgtcgtcggtgtcggc

SEQ ID NO: 1350 - DNA, 19 bp, Artificial Sequence
  Description of Artificial Sequence: Synthetic primer
tttccgccgctacaaccaa

SEQ ID NO: 1351 - DNA, 19 bp, Artificial Sequence
  Description of Artificial Sequence: Synthetic primer
tgctcagacgctgcttcaa

SEQ ID NO: 1352 - DNA, 50 bp, Artificial Sequence
  Description of Artificial Sequence: Synthetic primer
  Description of Combined DNA/RNA Molecule: Synthetic primer
tgctcagacgctgcttcaatcaaatataacccaaacgcgacgatgaccgt

SEQ ID NO: 1353 - DNA, 20 bp, Artificial Sequence
  Description of Artificial Sequence: Synthetic primer
  Description of Combined DNA/RNA Molecule: Synthetic primer
cgtcgagcggttggcggtgc

SEQ ID NO: 1354 - DNA, 33 bp, Artificial Sequence
  Description of Artificial Sequence: Synthetic primer
  Description of Combined DNA/RNA Molecule: Synthetic primer
ggtgtcgtggcgacgacactttcgcgaacccgg

SEQ ID NO: 1355 - DNA, 49 bp, Artificial Sequence
  Description of Artificial Sequence: Synthetic oligonucleotide
  Description of Combined DNA/RNA Molecule: Synthetic oligonucleotide
tcagtgaaaacacatccacccaggttagatggaggcggtggcacgggcc

SEQ ID NO: 1356 - DNA, 43 bp, Artificial Sequence
  Description of Artificial Sequence: Synthetic oligonucleotide
gggtttatggtgggttgcgggtggtggtgagcagggatgagca

SEQ ID NO: 1357 - DNA, 26 bp, Artificial Sequence
  Description of Artificial Sequence: Synthetic probe
aagtggcacgggtttatggtgggttg

SEQ ID NO: 1358 - DNA, 22 bp, Artificial Sequence
  Description of Artificial Sequence: Synthetic primer
tcagtgaaaacacatccaccca

SEQ ID NO: 1359 - DNA, 19 bp, Artificial Sequence
  Description of Artificial Sequence: Synthetic primer
tgctcatccctgctcacca

SEQ ID NO: 1360 - DNA, 42 bp, Artificial Sequence
  Description of Artificial Sequence: Synthetic primer
  Description of Combined DNA/RNA Molecule: Synthetic primer
tgctcatccctgctcaccagcgaacccgaaccacctgcaact

SEQ ID NO: 1361 - DNA, 23 bp, Artificial Sequence
  Description of Artificial Sequence: Synthetic primer
  Description of Combined DNA/RNA Molecule: Synthetic primer
ggtttcgtttcgcggttcgtcgg

SEQ ID NO: 1362 - DNA, 37 bp, Artificial Sequence
  Description of Artificial Sequence: Synthetic primer
  Description of Combined DNA/RNA Molecule: Synthetic primer
ggtgtcgtggcacaatttccaaaaccgcataacaaac

SEQ ID NO: 1363 - DNA, 51 bp, Artificial Sequence
  Description of Artificial Sequence: Synthetic oligonucleotide
  Description of Combined DNA/RNA Molecule: Synthetic oligonucleotide
tccggcctttgacgataccggttcgtcgattggttttagtcgtctcggcac

SEQ ID NO: 1364 - DNA, 70 bp, Artificial Sequence
  Description of Artificial Sequence: Synthetic oligonucleotide
ggcgttaagatttaattttatattacgcgtttaggttacgtttatttgggtaattcactcgaacggagca

SEQ ID NO: 1365 - DNA, 44 bp, Artificial Sequence
  Description of Artificial Sequence: Synthetic probe
tttcgtctcggcgttaagatttaattttatattacgcgtttagg

SEQ ID NO: 1366 - DNA, 19 bp, Artificial Sequence
  Description of Artificial Sequence: Synthetic primer
tccggcctttgacgatacc

SEQ ID NO: 1367 - DNA, 22 bp, Artificial Sequence
  Description of Artificial Sequence: Synthetic primer
tgctccgttcgagtgaattacc

SEQ ID NO: 1368 - DNA, 58 bp, Artificial Sequence
  Description of Artificial Sequence: Synthetic primer
  Description of Combined DNA/RNA Molecule: Synthetic primer
tgctccgttcgagtgaattaccacaatttccaaaaccgcataacaaataaatguaact

SEQ ID NO: 1369 - DNA, 21 bp, Artificial Sequence
  Description of Artificial Sequence: Synthetic primer
  Description of Combined DNA/RNA Molecule: Synthetic primer
gttgttgcgttgcggcgcggg

SEQ ID NO: 1370 - DNA, 32 bp, Artificial Sequence
  Description of Artificial Sequence: Synthetic primer
  Description of Combined DNA/RNA Molecule: Synthetic primer
ggtgtcgtggaccccgaaacaacgcaaaccgt

SEQ ID NO: 1371 - DNA, 52 bp, Artificial Sequence
  Description of Artificial Sequence: Synthetic oligonucleotide
  Description of Combined DNA/RNA Molecule: Synthetic oligonucleotide
ttgcacccgcgacataaccggattttaatttggtgttagaggacagcgtaat

SEQ ID NO: 1372 - DNA, 48 bp, Artificial Sequence
  Description of Artificial Sequence: Synthetic oligonucleotide
gtagcggttgtgtatttggcggtcggggtaattcactcgaacggagca

SEQ ID NO: 1373 - DNA, 29 bp, Artificial Sequence
  Description of Artificial Sequence: Synthetic probe
ttggacagcgtagcggttgtgtatttggc

SEQ ID NO: 1374 - DNA, 19 bp, Artificial Sequence
  Description of Artificial Sequence: Synthetic primer
ttgcacccgcgacataacc

SEQ ID NO: 1375 - DNA, 22 bp, Artificial Sequence
  Description of Artificial Sequence: Synthetic primer
tgctccgttcgagtgaattacc

SEQ ID NO: 1376 - DNA, 47 bp, Artificial Sequence
  Description of Artificial Sequence: Synthetic primer
  Description of Combined DNA/RNA Molecule: Synthetic primer
tgctccgttcgagtgaattacccgcgcgaataccgaactctgaccgt

SEQ ID NO: 1377 - DNA, 26 bp, Artificial Sequence
  Description of Artificial Sequence: Synthetic primer
  Description of Combined DNA/RNA Molecule: Synthetic primer
tttgttgttcgtcgttcgtacgtttg

SEQ ID NO: 1378 - DNA, 36 bp, Artificial Sequence
  Description of Artificial Sequence: Synthetic primer
  Description of Combined DNA/RNA Molecule: Synthetic primer
ggtgtcgtggccgaaaaaaccgatacgtcgautaag

SEQ ID NO: 1379 - DNA, 46 bp, Artificial Sequence
  Description of Artificial Sequence: Synthetic oligonucleotide
  Description of Combined DNA/RNA Molecule: Synthetic oligonucleotide
tccggcctttgacgatacccgtttaagtcgtcgggtcgggcggacc

SEQ ID NO: 1380 - DNA, 60 bp, Artificial Sequence
  Description of Artificial Sequence: Synthetic oligonucleotide
ggattttttttacgtcgtcgattcgttcgatttttgcgggtaattcactcgaacggagca

SEQ ID NO: 1381 - DNA, 33 bp, Artificial Sequence
  Description of Artificial Sequence: Synthetic probe
ttgtcgggcggattttttttacgtcgtcgattc

SEQ ID NO: 1382 - DNA, 19 bp, Artificial Sequence
  Description of Artificial Sequence: Synthetic primer
tccggcctttgacgatacc

SEQ ID NO: 1383 - DNA, 22 bp, Artificial Sequence
  Description of Artificial Sequence: Synthetic primer
tgctccgttcgagtgaattacc

SEQ ID NO: 1384 - DNA, 56 bp, Artificial Sequence
  Description of Artificial Sequence: Synthetic primer
  Description of Combined DNA/RNA Molecule: Synthetic primer
tgctccgttcgagtgaattacccgaaaaaaccgatacgtcgattaaaaatgcaaag

SEQ ID NO: 1385 - DNA, 36 bp, Artificial Sequence
  Description of Artificial Sequence: Synthetic primer
  Description of Combined DNA/RNA Molecule: Synthetic primer
gtttttgataattaatttcgggtatttagtcgtttc

SEQ ID NO: 1386 - DNA, 33 bp, Artificial Sequence
  Description of Artificial Sequence: Synthetic primer
  Description of Combined DNA/RNA Molecule: Synthetic primer
ggtgtcgtggcatcgcctcccgcttatcaccag

SEQ ID NO: 1387 - DNA, 59 bp, Artificial Sequence
  Description of Artificial Sequence: Synthetic oligonucleotide
  Description of Combined DNA/RNA Molecule: Synthetic oligonucleotide
tccggcctttgacgataccgtatttagtcgtttttgtaagtttaaggagacaacgagag

SEQ ID NO: 1388 - DNA, 41 bp, Artificial Sequence
  Description of Artificial Sequence: Synthetic oligonucleotide
gaggaggagcggaggaagtggtaattcactcgaacggagca

SEQ ID NO: 1389 - DNA, 22 bp, Artificial Sequence
  Description of Artificial Sequence: Synthetic probe
ttagacaacgaggaggagcggg

SEQ ID NO: 1390 - DNA, 19 bp, Artificial Sequence
  Description of Artificial Sequence: Synthetic primer
tccggcctttgacgatacc

SEQ ID NO: 1391 - DNA, 22 bp, Artificial Sequence
  Description of Artificial Sequence: Synthetic primer
tgctccgttcgagtgaattacc

SEQ ID NO: 1392 - DNA, 51 bp, Artificial Sequence
  Description of Artificial Sequence: Synthetic primer
  Description of Combined DNA/RNA Molecule: Synthetic primer
tgctccgttcgagtgaattacccaaccccttccccacctaataatgcactc

SEQ ID NO: 1393 - DNA, 22 bp, Artificial Sequence
  Description of Artificial Sequence: Synthetic primer
  Description of Combined DNA/RNA Molecule: Synthetic primer
cggatcgtaggttgggcggttc

SEQ ID NO: 1394 - DNA, 32 bp, Artificial Sequence
  Description of Artificial Sequence: Synthetic primer
  Description of Combined DNA/RNA Molecule: Synthetic primer
ggtgtcgtggccgcgacctaaaaacgcuccct

SEQ ID NO: 1395 - DNA, 49 bp, Artificial Sequence
  Description of Artificial Sequence: Synthetic oligonucleotide
  Description of Combined DNA/RNA Molecule: Synthetic oligonucleotide
tcgcggaaagtcccagtaacgttgggcggtttttgattttttgcgttcc

SEQ ID NO: 1396 - DNA, 57 bp, Artificial Sequence
  Description of Artificial Sequence: Synthetic oligonucleotide
gtttttcgtttatagtcggagttcggtagttggaagtgttggcctgtaagcgttcca

SEQ ID NO: 1397 - DNA, 41 bp, Artificial Sequence
  Description of Artificial Sequence: Synthetic probe
cctttttgcgtttttcgtttatagtcggagttcggtagttg

SEQ ID NO: 1398 - DNA, 20 bp, Artificial Sequence
  Description of Artificial Sequence: Synthetic primer
tcgcggaaagtcccagtaac

SEQ ID NO: 1399 - DNA, 20 bp, Artificial Sequence
  Description of Artificial Sequence: Synthetic primer
tggaacgcttacaggccaac

SEQ ID NO: 1400 - DNA, 50 bp, Artificial Sequence
  Description of Artificial Sequence: Synthetic primer
  Description of Combined DNA/RNA Molecule: Synthetic primer
tggaacgcttacaggccaaccctaaaaacgctccccgaaataatgcaacc

SEQ ID NO: 1401 - DNA, 30 bp, Artificial Sequence
  Description of Artificial Sequence: Synthetic primer
  Description of Combined DNA/RNA Molecule: Synthetic primer
tttcgtttcggttttgtatagtttcgaagc

SEQ ID NO: 1402 - DNA, 36 bp, Artificial Sequence
  Description of Artificial Sequence: Synthetic primer
  Description of Combined DNA/RNA Molecule: Synthetic primer
ggtgtcgtggaaaaaaaaaccgcgataacccctaag

SEQ ID NO: 1403 - DNA, 53 bp, Artificial Sequence
  Description of Artificial Sequence: Synthetic oligonucleotide
  Description of Combined DNA/RNA Molecule: Synthetic oligonucleotide
tgaacgctcaaacacgtgaactgtatagtttcgaagttcgtcgggctcggtgc

SEQ ID NO: 1404 - DNA, 69 bp, Artificial Sequence
  Description of Artificial Sequence: Synthetic oligonucleotide
ggttattttgttttaagggtaagtaaggaatacgtttttttagttttaggttggcctgtaagcgttcca

SEQ ID NO: 1405 - DNA, 38 bp, Artificial Sequence
  Description of Artificial Sequence: Synthetic probe
aacgggctcggttattttgttttaagggtaagtaagga

SEQ ID NO: 1406 - DNA, 21 bp, Artificial Sequence
  Description of Artificial Sequence: Synthetic primer
tgaacgctcaaacacgtgaac

SEQ ID NO: 1407 - DNA, 20 bp, Artificial Sequence
  Description of Artificial Sequence: Synthetic primer
tggaacgcttacaggccaac

SEQ ID NO: 1408 - DNA, 30 bp, Artificial Sequence
  Description of Artificial Sequence: Synthetic primer
  Description of Combined DNA/RNA Molecule: Synthetic primer
gataagaggatgattttaaagggacgtagc

SEQ ID NO: 1409 - DNA, 32 bp, Artificial Sequence
  Description of Artificial Sequence: Synthetic primer
  Description of Combined DNA/RNA Molecule: Synthetic primer
ggtgtcgtggcaacgccatcgcgtaaccaacc

SEQ ID NO: 1410 - DNA, 52 bp, Artificial Sequence
  Description of Artificial Sequence: Synthetic oligonucleotide
  Description of Combined DNA/RNA Molecule: Synthetic oligonucleotide
tacacgtggatatctccgaccgggacgtagtggtttcgtttatcatcgttcc

SEQ ID NO: 1411 - DNA, 50 bp, Artificial Sequence
  Description of Artificial Sequence: Synthetic oligonucleotide
gtttttatagggagggagtcgcggtttcgggtgctagtcacacagttcca

SEQ ID NO: 1412 - DNA, 33 bp, Artificial Sequence
  Description of Artificial Sequence: Synthetic probe
aatatcatcgtttttatagggagggagtcgcgg

SEQ ID NO: 1413 - DNA, 21 bp, Artificial Sequence
  Description of Artificial Sequence: Synthetic primer
tacacgtggatatctccgacc

SEQ ID NO: 1414 - DNA, 21 bp, Artificial Sequence
  Description of Artificial Sequence: Synthetic primer
tggaactgtgtgactagcacc

SEQ ID NO: 1415 - DNA, 47 bp, Artificial Sequence
  Description of Artificial Sequence: Synthetic primer
  Description of Combined DNA/RNA Molecule: Synthetic primer
tggaactgtgtgactagcacccgccatcgcgtaaccaacttgaaact

SEQ ID NO: 1416 - DNA, 30 bp, Artificial Sequence
  Description of Artificial Sequence: Synthetic primer
  Description of Combined DNA/RNA Molecule: Synthetic primer
gtttattttcgaggttaattcgttcgtttc

SEQ ID NO: 1417 - DNA, 32 bp, Artificial Sequence
  Description of Artificial Sequence: Synthetic primer
  Description of Combined DNA/RNA Molecule: Synthetic primer
ggtgtcgtggttacccaccaccccgaaaatag

SEQ ID NO: 1418 - DNA, 54 bp, Artificial Sequence
  Description of Artificial Sequence: Synthetic oligonucleotide
  Description of Combined DNA/RNA Molecule: Synthetic oligonucleotide
tagcattcgagaacgcaccgaggttaattcgttcgtttttttgagtctcgatta

SEQ ID NO: 1419 - DNA, 57 bp, Artificial Sequence
  Description of Artificial Sequence: Synthetic oligonucleotide
gatcggttgaatagtttagtgattatttcggcggtgggtgctagtcacacagttcca

SEQ ID NO: 1420 - DNA, 40 bp, Artificial Sequence
  Description of Artificial Sequence: Synthetic probe
aagagtctcgatcggttgaatagtttagtgattatttcgg

SEQ ID NO: 1421 - DNA, 19 bp, Artificial Sequence
  Description of Artificial Sequence: Synthetic primer
tagcattcgagaacgcacc

SEQ ID NO: 1422 - DNA, 21 bp, Artificial Sequence
  Description of Artificial Sequence: Synthetic primer
tggaactgtgtgactagcacc

SEQ ID NO: 1423 - DNA, 50 bp, Artificial Sequence
  Description of Artificial Sequence: Synthetic primer
  Description of Combined DNA/RNA Molecule: Synthetic primer
tggaactgtgtgactagcaccccaccccgaaaataaacatcactgccgag

SEQ ID NO: 1424 - DNA, 24 bp, Artificial Sequence
  Description of Artificial Sequence: Synthetic primer
  Description of Combined DNA/RNA Molecule: Synthetic primer
gtttgtgtagggcgaggacgggat

SEQ ID NO: 1425 - DNA, 36 bp, Artificial Sequence
  Description of Artificial Sequence: Synthetic primer
  Description of Combined DNA/RNA Molecule: Synthetic primer
ggtgtcgtggacgaatcttctacatccgacaacaac

SEQ ID NO: 1426 - DNA, 43 bp, Artificial Sequence
  Description of Artificial Sequence: Synthetic oligonucleotide
  Description of Combined DNA/RNA Molecule: Synthetic oligonucleotide
taaccgggcctaaagtgacacgaggcggttttgcgctcggtcg

SEQ ID NO: 1427 - DNA, 65 bp, Artificial Sequence
  Description of Artificial Sequence: Synthetic oligonucleotide
ggttaggttggttttcgaggatttagtcgtttttaattttttatgttacgtgatctccctctcca

SEQ ID NO: 1428 - DNA, 28 bp, Artificial Sequence
  Description of Artificial Sequence: Synthetic probe
aatgcgctcggttaggttggttttcgag

SEQ ID NO: 1429 - DNA, 20 bp, Artificial Sequence
  Description of Artificial Sequence: Synthetic primer
taaccgggcctaaagtgaca

SEQ ID NO: 1430 - DNA, 22 bp, Artificial Sequence
  Description of Artificial Sequence: Synthetic primer
tggagagggagatcacgtaaca

SEQ ID NO: 1431 - DNA, 62 bp, Artificial Sequence
  Description of Artificial Sequence: Synthetic primer
  Description of Combined DNA/RNA Molecule: Synthetic primer
tggagagggagatcacgtaacatctacatccgacaacaatttaaaaaattaaaaatgactag

SEQ ID NO: 1432 - DNA, 26 bp, Artificial Sequence
  Description of Artificial Sequence: Synthetic primer
  Description of Combined DNA/RNA Molecule: Synthetic primer
gggtttcgattcgaataaggcggtgc

SEQ ID NO: 1433 - DNA, 35 bp, Artificial Sequence
  Description of Artificial Sequence: Synthetic primer
  Description of Combined DNA/RNA Molecule: Synthetic primer
ggtgtcgtggtccgaaaaatcgtccgactccgcca

SEQ ID NO: 1434 - DNA, 45 bp, Artificial Sequence
  Description of Artificial Sequence: Synthetic oligonucleotide
  Description of Combined DNA/RNA Molecule: Synthetic oligonucleotide
tcgatggtcaatgagcttcacagtggaggagagtcgtagcgcgaa

SEQ ID NO: 1435 - DNA, 37 bp, Artificial Sequence
  Description of Artificial Sequence: Synthetic oligonucleotide
gcgggagcggcgtggtgttacgtgatctccctctcca

SEQ ID NO: 1436 - DNA, 19 bp, Artificial Sequence
  Description of Artificial Sequence: Synthetic probe
tttcgtagcgcgggagcgg

SEQ ID NO: 1437 - DNA, 22 bp, Artificial Sequence
  Description of Artificial Sequence: Synthetic primer
tcgatggtcaatgagcttcaca

SEQ ID NO: 1438 - DNA, 22 bp, Artificial Sequence
  Description of Artificial Sequence: Synthetic primer
tggagagggagatcacgtaaca

SEQ ID NO: 1439 - DNA, 44 bp, Artificial Sequence
  Description of Artificial Sequence: Synthetic primer
  Description of Combined DNA/RNA Molecule: Synthetic primer
tggagagggagatcacgtaacacacccctatcgcccctgcacct

SEQ ID NO: 1440 - DNA, 24 bp, Artificial Sequence
  Description of Artificial Sequence: Synthetic primer
  Description of Combined DNA/RNA Molecule: Synthetic primer
gtcgtagtagggcgttgacgagtc

SEQ ID NO: 1441 - DNA, 38 bp, Artificial Sequence
  Description of Artificial Sequence: Synthetic primer
  Description of Combined DNA/RNA Molecule: Synthetic primer
ggtgtcgtggtctccgttaaaccttaacctctacccag

SEQ ID NO: 1442 - DNA, 52 bp, Artificial Sequence
  Description of Artificial Sequence: Synthetic oligonucleotide
  Description of Combined DNA/RNA Molecule: Synthetic oligonucleotide
tcgatggtcaatgagcttcacagcgttgacgagtttcgtcgagtctcgtcac

SEQ ID NO: 1443 - DNA, 56 bp, Artificial Sequence
  Description of Artificial Sequence: Synthetic oligonucleotide
gtcgttcgggtttaaggtcgtttttacgtttacgtgttacgtgatctccctctcca

SEQ ID NO: 1444 - DNA, 29 bp, Artificial Sequence
  Description of Artificial Sequence: Synthetic probe
aagagtctcgtcgttcgggtttaaggtcg

SEQ ID NO: 1445 - DNA, 22 bp, Artificial Sequence
  Description of Artificial Sequence: Synthetic primer
tcgatggtcaatgagcttcaca

SEQ ID NO: 1446 - DNA, 22 bp, Artificial Sequence
  Description of Artificial Sequence: Synthetic primer
tggagagggagatcacgtaaca

SEQ ID NO: 1447 - DNA, 58 bp, Artificial Sequence
  Description of Artificial Sequence: Synthetic primer
  Description of Combined DNA/RNA Molecule: Synthetic primer
tggagagggagatcacgtaacacctctacccaaaaaacaaaaaatcgtaaatguaaag

SEQ ID NO: 1448 - DNA, 23 bp, Artificial Sequence
  Description of Artificial Sequence: Synthetic primer
  Description of Combined DNA/RNA Molecule: Synthetic primer
tttggagggtgcgtagtcgggca

SEQ ID NO: 1449 - DNA, 45 bp, Artificial Sequence
  Description of Artificial Sequence: Synthetic primer
  Description of Combined DNA/RNA Molecule: Synthetic primer
ggtgtcgtggaaaccttaactaaacaataaaaccaattaccccgg

SEQ ID NO: 1450 - DNA, 51 bp, Artificial Sequence
  Description of Artificial Sequence: Synthetic oligonucleotide
  Description of Combined DNA/RNA Molecule: Synthetic oligonucleotide
tctcgggaccacaatacgaacgtgcgtagtcgggcgttattaggtcgggcc

SEQ ID NO: 1451 - DNA, 61 bp, Artificial Sequence
  Description of Artificial Sequence: Synthetic oligonucleotide
gggttttttttatgtttcgtgaacgtaattatttttcgagggttacgctaagctggtgcca

SEQ ID NO: 1452 - DNA, 36 bp, Artificial Sequence
  Description of Artificial Sequence: Synthetic probe
ccttaggtcgggttttttttatgtttcgtgaacgta

SEQ ID NO: 1453 - DNA, 21 bp, Artificial Sequence
  Description of Artificial Sequence: Synthetic primer
tctcgggaccacaatacgaac

SEQ ID NO: 1454 - DNA, 20 bp, Artificial Sequence
  Description of Artificial Sequence: Synthetic primer
tggcaccagcttagcgtaac

SEQ ID NO: 1455 - DNA, 56 bp, Artificial Sequence
  Description of Artificial Sequence: Synthetic primer
  Description of Combined DNA/RNA Molecule: Synthetic primer
tggcaccagcttagcgtaacccttaactaaacaataaaaccaattaccctgaaaag

SEQ ID NO: 1456 - DNA, 27 bp, Artificial Sequence
  Description of Artificial Sequence: Synthetic primer
  Description of Combined DNA/RNA Molecule: Synthetic primer
tagtttggacggtgtggatttcgggtc

SEQ ID NO: 1457 - DNA, 31 bp, Artificial Sequence
  Description of Artificial Sequence: Synthetic primer
  Description of Combined DNA/RNA Molecule: Synthetic primer
ggtgtcgtggcgatacgacgacccgcaaaag

SEQ ID NO: 1458 - DNA, 46 bp, Artificial Sequence
  Description of Artificial Sequence: Synthetic oligonucleotide
  Description of Combined DNA/RNA Molecule: Synthetic oligonucleotide
ttgctgtgcgcggtagaactgtggatttcgggttttgcaacgttga

SEQ ID NO: 1459 - DNA, 60 bp, Artificial Sequence
  Description of Artificial Sequence: Synthetic oligonucleotide
gttagatcggttttagcggttcgtattcgtattttgtaaggttacgctaagctggtgcca

SEQ ID NO: 1460 - DNA, 32 bp, Artificial Sequence
  Description of Artificial Sequence: Synthetic probe
aattgcaacgttagatcggttttagcggttcg

SEQ ID NO: 1461 - DNA, 19 bp, Artificial Sequence
  Description of Artificial Sequence: Synthetic primer
ttgctgtgcgcggtagaac

SEQ ID NO: 1462 - DNA, 20 bp, Artificial Sequence
  Description of Artificial Sequence: Synthetic primer
tggcaccagcttagcgtaac

SEQ ID NO: 1463 - DNA, 55 bp, Artificial Sequence
  Description of Artificial Sequence: Synthetic primer
  Description of Combined DNA/RNA Molecule: Synthetic primer
tggcaccagcttagcgtaacccgcaaaaaaaaacgaacttacaaaatatgaatat

SEQ ID NO: 1464 - DNA, 35 bp, Artificial Sequence
  Description of Artificial Sequence: Synthetic primer
  Description of Combined DNA/RNA Molecule: Synthetic primer
aagttttatagagtaggaatatttttcgtcgttaa

SEQ ID NO: 1465 - DNA, 38 bp, Artificial Sequence
  Description of Artificial Sequence: Synthetic primer
  Description of Combined DNA/RNA Molecule: Synthetic primer
ggtgtcgtggaaacgatcctaaatccgaaactactctg

SEQ ID NO: 1466 - DNA, 46 bp, Artificial Sequence
  Description of Artificial Sequence: Synthetic oligonucleotide
  Description of Combined DNA/RNA Molecule: Synthetic oligonucleotide
tctcgattacgctccgcacttcgtcgttaggtgttgggcgcgtcaa

SEQ ID NO: 1467 - DNA, 63 bp, Artificial Sequence
  Description of Artificial Sequence: Synthetic oligonucleotide
gtcggttcggttattagtttgtcgtttttttttttttttcggtgtgtagcttagacatggcca

SEQ ID NO: 1468 - DNA, 26 bp, Artificial Sequence
  Description of Artificial Sequence: Synthetic probe
aatgggcgcgtcggttcggttattag

SEQ ID NO: 1469 - DNA, 19 bp, Artificial Sequence
  Description of Artificial Sequence: Synthetic primer
tctcgattacgctccgcac

SEQ ID NO: 1470 - DNA, 22 bp, Artificial Sequence
  Description of Artificial Sequence: Synthetic primer
tggccatgtctaagctacacac

SEQ ID NO: 1471 - DNA, 55 bp, Artificial Sequence
  Description of Artificial Sequence: Synthetic primer
  Description of Combined DNA/RNA Molecule: Synthetic primer
tggccatgtctaagctacacaccctaaatccgaaactactctaaccactgaaaag

SEQ ID NO: 1472 - DNA, 22 bp, Artificial Sequence
  Description of Artificial Sequence: Synthetic primer
  Description of Combined DNA/RNA Molecule: Synthetic primer
ggatatggtgcggtggcggtaa

SEQ ID NO: 1473 - DNA, 33 bp, Artificial Sequence
  Description of Artificial Sequence: Synthetic primer
  Description of Combined DNA/RNA Molecule: Synthetic primer
ggtgtcgtggcgccttaaccgcgaactccctct

SEQ ID NO: 1474 - DNA, 48 bp, Artificial Sequence
  Description of Artificial Sequence: Synthetic oligonucleotide
  Description of Combined DNA/RNA Molecule: Synthetic oligonucleotide
tcacagagacttgccgatcacgcgggcggttggattttaaatcggcac

SEQ ID NO: 1475 - DNA, 50 bp, Artificial Sequence
  Description of Artificial Sequence: Synthetic oligonucleotide
ggcgttgcgttttatatgacggttcgcggtgtgtagcttagacatggcca

SEQ ID NO: 1476 - DNA, 34 bp, Artificial Sequence
  Description of Artificial Sequence: Synthetic probe
aattaaatcggcgttgcgttttatatgacggttc

SEQ ID NO: 1477 - DNA, 21 bp, Artificial Sequence
  Description of Artificial Sequence: Synthetic primer
tcacagagacttgccgatcac

SEQ ID NO: 1478 - DNA, 22 bp, Artificial Sequence
  Description of Artificial Sequence: Synthetic primer
tggccatgtctaagctacacac

SEQ ID NO: 1479 - DNA, 44 bp, Artificial Sequence
  Description of Artificial Sequence: Synthetic primer
  Description of Combined DNA/RNA Molecule: Synthetic primer
tggccatgtctaagctacacacctccctccccgaacctgcgaat

SEQ ID NO: 1480 - DNA, 24 bp, Artificial Sequence
  Description of Artificial Sequence: Synthetic primer
  Description of Combined DNA/RNA Molecule: Synthetic primer
aggtttaggttttcgaggcgtttc

SEQ ID NO: 1481 - DNA, 34 bp, Artificial Sequence
  Description of Artificial Sequence: Synthetic primer
  Description of Combined DNA/RNA Molecule: Synthetic primer
ggtgtcgtggcccaaaaccctcaaaccgaaaaca

SEQ ID NO: 1482 - DNA, 58 bp, Artificial Sequence
  Description of Artificial Sequence: Synthetic oligonucleotide
  Description of Combined DNA/RNA Molecule: Synthetic oligonucleotide
tcacagagacttgccgatcacgggcgttttttttaattcgtttcgtttttctcgttcc

SEQ ID NO: 1483 - DNA, 59 bp, Artificial Sequence
  Description of Artificial Sequence: Synthetic oligonucleotide
gtttttttacgcgtattttgtttgtggttttcgtgcggtgtgtagcttagacatggcca

SEQ ID NO: 1484 - DNA, 41 bp, Artificial Sequence
  Description of Artificial Sequence: Synthetic probe
aattttctcgtttttttacgcgtattttgtttgtggttttc

SEQ ID NO: 1485 - DNA, 21 bp, Artificial Sequence
  Description of Artificial Sequence: Synthetic primer
tcacagagacttgccgatcac

SEQ ID NO: 1486 - DNA, 22 bp, Artificial Sequence
  Description of Artificial Sequence: Synthetic primer
tggccatgtctaagctacacac

SEQ ID NO: 1487 - DNA, 51 bp, Artificial Sequence
  Description of Artificial Sequence: Synthetic primer
  Description of Combined DNA/RNA Molecule: Synthetic primer
tggccatgtctaagctacacaccccaaaaccctcaaaccgaaaatgcactg

SEQ ID NO: 1488 - DNA, 31 bp, Artificial Sequence
  Description of Artificial Sequence: Synthetic primer
  Description of Combined DNA/RNA Molecule: Synthetic primer
gtcgttattcggtcgtgattataatcgaggc

SEQ ID NO: 1489 - DNA, 39 bp, Artificial Sequence
  Description of Artificial Sequence: Synthetic primer
  Description of Combined DNA/RNA Molecule: Synthetic primer
ggtgtcgtggactttcctctacgactcaaataaaaattg

SEQ ID NO: 1490 - DNA, 68 bp, Artificial Sequence
  Description of Artificial Sequence: Synthetic oligonucleotide
  Description of Combined DNA/RNA Molecule: Synthetic oligonucleotide
ttcgtccctgcacgctaacttttgtttgtagagtaatatattaggtttaaatttatcgttctcggtga

SEQ ID NO: 1491 - DNA, 53 bp, Artificial Sequence
  Description of Artificial Sequence: Synthetic oligonucleotide
ggtagtcgttttacgcgggttttttttcggtaggttccatcaccgttaggcca

SEQ ID NO: 1492 - DNA, 28 bp, Artificial Sequence
  Description of Artificial Sequence: Synthetic probe
cccgttctcggtagtcgttttacgcggg

SEQ ID NO: 1493 - DNA, 19 bp, Artificial Sequence
  Description of Artificial Sequence: Synthetic primer
ttcgtccctgcacgctaac

SEQ ID NO: 1494 - DNA, 20 bp, Artificial Sequence
  Description of Artificial Sequence: Synthetic primer
tggcctaacggtgatggaac

SEQ ID NO: 1495 - DNA, 60 bp, Artificial Sequence
  Description of Artificial Sequence: Synthetic primer
  Description of Combined DNA/RNA Molecule: Synthetic primer
tggcctaacggtgatggaaccctctacgactcaaataaaaattaaaaaatctactgaaag

SEQ ID NO: 1496 - DNA, 35 bp, Artificial Sequence
  Description of Artificial Sequence: Synthetic primer
  Description of Combined DNA/RNA Molecule: Synthetic primer
gatttagtttgaggttataaaggtttttacgtttc

SEQ ID NO: 1497 - DNA, 39 bp, Artificial Sequence
  Description of Artificial Sequence: Synthetic primer
  Description of Combined DNA/RNA Molecule: Synthetic primer
ggtgtcgtggccttactaaaaccctaatcttcgauctag

SEQ ID NO: 1498 - DNA, 62 bp, Artificial Sequence
  Description of Artificial Sequence: Synthetic oligonucleotide
  Description of Combined DNA/RNA Molecule: Synthetic oligonucleotide
tgatgctggcaaaccctagaacgaggttataaaggtttttacgttttattgaaagacggtcc

SEQ ID NO: 1499 - DNA, 67 bp, Artificial Sequence
  Description of Artificial Sequence: Synthetic oligonucleotide
ggtttttttttatttgtgtttattcgtttttgtagttttttttttaggttccatcaccgttaggcca

SEQ ID NO: 1500 - DNA, 44 bp, Artificial Sequence
  Description of Artificial Sequence: Synthetic probe
aagaaagacggtttttttttatttgtgtttattcgtttttgtag

SEQ ID NO: 1501 - DNA, 22 bp, Artificial Sequence
  Description of Artificial Sequence: Synthetic primer
tgatgctggcaaaccctagaac

SEQ ID NO: 1502 - DNA, 20 bp, Artificial Sequence
  Description of Artificial Sequence: Synthetic primer
tggcctaacggtgatggaac

SEQ ID NO: 1503 - DNA, 32 bp, Artificial Sequence
  Description of Artificial Sequence: Synthetic primer
  Description of Combined DNA/RNA Molecule: Synthetic primer
gtcgcgttttttagttttataggattcgttta

SEQ ID NO: 1504 - DNA, 43 bp, Artificial Sequence
  Description of Artificial Sequence: Synthetic primer
  Description of Combined DNA/RNA Molecule: Synthetic primer
ggtgtcgtggaactaatcaaccaaaaaaaaatctcgaaaacag

SEQ ID NO: 1505 - DNA, 62 bp, Artificial Sequence
  Description of Artificial Sequence: Synthetic oligonucleotide
  Description of Combined DNA/RNA Molecule: Synthetic oligonucleotide
tgatgctggcaaaccctagaacgtttgtattttttttggttttttttttcgtggctcgggcc

SEQ ID NO: 1506 - DNA, 55 bp, Artificial Sequence
  Description of Artificial Sequence: Synthetic oligonucleotide
gggtttatttttggttcgttaaatttcgttcgttggttccatcaccgttaggcca

SEQ ID NO: 1507 - DNA, 37 bp, Artificial Sequence
  Description of Artificial Sequence: Synthetic probe
aagtggctcgggtttatttttggttcgttaaatttcg

SEQ ID NO: 1508 - DNA, 22 bp, Artificial Sequence
  Description of Artificial Sequence: Synthetic primer
tgatgctggcaaaccctagaac

SEQ ID NO: 1509 - DNA, 20 bp, Artificial Sequence
  Description of Artificial Sequence: Synthetic primer
tggcctaacggtgatggaac

SEQ ID NO: 1510 - DNA, 59 bp, Artificial Sequence
  Description of Artificial Sequence: Synthetic primer
  Description of Combined DNA/RNA Molecule: Synthetic primer
tggcctaacggtgatggaacactaatcaaccaaaaaaaaatctcgaaaacaatgaacgg

SEQ ID NO: 1511 - DNA, 26 bp, Artificial Sequence
  Description of Artificial Sequence: Synthetic primer
  Description of Combined DNA/RNA Molecule: Synthetic primer
ggttcgtggtgacggttatacgggtg

SEQ ID NO: 1512 - DNA, 39 bp, Artificial Sequence
  Description of Artificial Sequence: Synthetic primer
  Description of Combined DNA/RNA Molecule: Synthetic primer
ggtgtcgtggaataacctaaacactatcaaacgccgatc

SEQ ID NO: 1513 - DNA, 45 bp, Artificial Sequence
  Description of Artificial Sequence: Synthetic oligonucleotide
  Description of Combined DNA/RNA Molecule: Synthetic oligonucleotide
ttttcggcatccgcttccaggtaggaggttggcgaatggcgggac

SEQ ID NO: 1514 - DNA, 54 bp, Artificial Sequence
  Description of Artificial Sequence: Synthetic oligonucleotide
ggagttgtggttgaggttgggttattaaagcggtggttaacagaggacaggcca

SEQ ID NO: 1515 - DNA, 28 bp, Artificial Sequence
  Description of Artificial Sequence: Synthetic probe
ttgaatggcggagttgtggttgaggttg

SEQ ID NO: 1516 - DNA, 19 bp, Artificial Sequence
  Description of Artificial Sequence: Synthetic primer
ttttcggcatccgcttcca

SEQ ID NO: 1517 - DNA, 21 bp, Artificial Sequence
  Description of Artificial Sequence: Synthetic primer
tggcctgtcctctgttaacca

SEQ ID NO: 1518 - DNA, 56 bp, Artificial Sequence
  Description of Artificial Sequence: Synthetic primer
  Description of Combined DNA/RNA Molecule: Synthetic primer
tggcctgtcctctgttaaccaaaaaaataacctaaacactatcaaacgctgctttg

SEQ ID NO: 1519 - DNA, 21 bp, Artificial Sequence
  Description of Artificial Sequence: Synthetic primer
  Description of Combined DNA/RNA Molecule: Synthetic primer
gtcgggttcgcgtagcgttgc

SEQ ID NO: 1520 - DNA, 30 bp, Artificial Sequence
  Description of Artificial Sequence: Synthetic primer
  Description of Combined DNA/RNA Molecule: Synthetic primer
ggtgtcgtggcgcgccgaaaccgaaaaaat

SEQ ID NO: 1521 - DNA, 47 bp, Artificial Sequence
  Description of Artificial Sequence: Synthetic oligonucleotide
  Description of Combined DNA/RNA Molecule: Synthetic oligonucleotide
tccgggtatacactgtcccacgttgtttgtagtcgcgtcatcgtacc

SEQ ID NO: 1522 - DNA, 62 bp, Artificial Sequence
  Description of Artificial Sequence: Synthetic oligonucleotide
gtatttattattattatattagcgcgaggaagtttacgtcgtggttaacagaggacaggcca

SEQ ID NO: 1523 - DNA, 43 bp, Artificial Sequence
  Description of Artificial Sequence: Synthetic probe
ttcgtcatcgtatttattattattatattagcgcgaggaagtt

SEQ ID NO: 1524 - DNA, 20 bp, Artificial Sequence
  Description of Artificial Sequence: Synthetic primer
tccgggtatacactgtccca

SEQ ID NO: 1525 - DNA, 21 bp, Artificial Sequence
  Description of Artificial Sequence: Synthetic primer
tggcctgtcctctgttaacca

SEQ ID NO: 1526 - DNA, 49 bp, Artificial Sequence
  Description of Artificial Sequence: Synthetic primer
  Description of Combined DNA/RNA Molecule: Synthetic primer
tggcctgtcctctgttaaccagccgaaaccgaaaaaactcgatguaaat

SEQ ID NO: 1527 - DNA, 32 bp, Artificial Sequence
  Description of Artificial Sequence: Synthetic primer
  Description of Combined DNA/RNA Molecule: Synthetic primer
ttttcgagatttttgtatttttttcgcgcgtc

SEQ ID NO: 1528 - DNA, 37 bp, Artificial Sequence
  Description of Artificial Sequence: Synthetic primer
  Description of Combined DNA/RNA Molecule: Synthetic primer
ggtgtcgtggccgacgaaaaattaaaaaccgcutctg

SEQ ID NO: 1529 - DNA, 58 bp, Artificial Sequence
  Description of Artificial Sequence: Synthetic oligonucleotide
  Description of Combined DNA/RNA Molecule: Synthetic oligonucleotide
tgcgactctattcacgtccaagatttttgtatttttttcgcgcgttatttctcgttcc

SEQ ID NO: 1530 - DNA, 66 bp, Artificial Sequence
  Description of Artificial Sequence: Synthetic oligonucleotide
gttttttataataggttcgaagagtaaatttttaaacgcgtttagttgctatttggtgtaccgcca

SEQ ID NO: 1531 - DNA, 47 bp, Artificial Sequence
  Description of Artificial Sequence: Synthetic probe
aaatttctcgttttttataataggttcgaagagtaaatttttaaacg

SEQ ID NO: 1532 - DNA, 21 bp, Artificial Sequence
  Description of Artificial Sequence: Synthetic primer
tgcgactctattcacgtccaa

SEQ ID NO: 1533 - DNA, 21 bp, Artificial Sequence
  Description of Artificial Sequence: Synthetic primer
tggcggtacaccaaatagcaa

SEQ ID NO: 1534 - DNA, 56 bp, Artificial Sequence
  Description of Artificial Sequence: Synthetic primer
  Description of Combined DNA/RNA Molecule: Synthetic primer
tggcggtacaccaaatagcaacgacgaaaaattaaaaaccgcttctaaatgcgttc

SEQ ID NO: 1535 - DNA, 21 bp, Artificial Sequence
  Description of Artificial Sequence: Synthetic primer
  Description of Combined DNA/RNA Molecule: Synthetic primer
ggcgaatcggaagggcgtttg

SEQ ID NO: 1536 - DNA, 36 bp, Artificial Sequence
  Description of Artificial Sequence: Synthetic primer
  Description of Combined DNA/RNA Molecule: Synthetic primer
ggtgtcgtggataatccgaaaaaccgacgaaaaact

SEQ ID NO: 1537 - DNA, 59 bp, Artificial Sequence
  Description of Artificial Sequence: Synthetic oligonucleotide
  Description of Combined DNA/RNA Molecule: Synthetic oligonucleotide
ttgtgcagagcgaacaacaagggcgtttaggtaaaaaataggaatagtatacgcgtaag

SEQ ID NO: 1538 - DNA, 53 bp, Artificial Sequence
  Description of Artificial Sequence: Synthetic oligonucleotide
gtagaaaggttttcgggtcgtttttttcgaggttgctatttggtgtaccgcca

SEQ ID NO: 1539 - DNA, 38 bp, Artificial Sequence
  Description of Artificial Sequence: Synthetic probe
tttatacgcgtagaaaggttttcgggtcgtttttttcg

SEQ ID NO: 1540 - DNA, 20 bp, Artificial Sequence
  Description of Artificial Sequence: Synthetic primer
ttgtgcagagcgaacaacaa

SEQ ID NO: 1541 - DNA, 21 bp, Artificial Sequence
  Description of Artificial Sequence: Synthetic primer
tggcggtacaccaaatagcaa

SEQ ID NO: 1542 - DNA, 49 bp, Artificial Sequence
  Description of Artificial Sequence: Synthetic primer
  Description of Combined DNA/RNA Molecule: Synthetic primer
tggcggtacaccaaatagcaaccgaaaaaccgacgaaaaacctgaaaag

SEQ ID NO: 1543 - DNA, 32 bp, Artificial Sequence
  Description of Artificial Sequence: Synthetic primer
  Description of Combined DNA/RNA Molecule: Synthetic primer
agattttagggtcgtagttttttttgcgtatg

SEQ ID NO: 1544 - DNA, 36 bp, Artificial Sequence
  Description of Artificial Sequence: Synthetic primer
  Description of Combined DNA/RNA Molecule: Synthetic primer
ggtgtcgtggccaacaaccccgaatatttcccaaac

SEQ ID NO: 1545 - DNA, 62 bp, Artificial Sequence
  Description of Artificial Sequence: Synthetic oligonucleotide
  Description of Combined DNA/RNA Molecule: Synthetic oligonucleotide
tccaaacgattaggagcgtcaagattttagggtcgtagttttttttgcgtatatgtcgagct

SEQ ID NO: 1546 - DNA, 53 bp, Artificial Sequence
  Description of Artificial Sequence: Synthetic oligonucleotide
gagtcgggattttgtttcgattattcgtcgggttggacagaggtatacgccca

SEQ ID NO: 1547 - DNA, 37 bp, Artificial Sequence
  Description of Artificial Sequence: Synthetic probe
aaatatgtcgagtcgggattttgtttcgattattcgt

SEQ ID NO: 1548 - DNA, 22 bp, Artificial Sequence
  Description of Artificial Sequence: Synthetic primer
tccaaacgattaggagcgtcaa

SEQ ID NO: 1549 - DNA, 21 bp, Artificial Sequence
  Description of Artificial Sequence: Synthetic primer
tgggcgtatacctctgtccaa

SEQ ID NO: 1550 - DNA, 59 bp, Artificial Sequence
  Description of Artificial Sequence: Synthetic primer
  Description of Combined DNA/RNA Molecule: Synthetic primer
tgggcgtatacctctgtccaaccgaatatttcccaaattattcaaaaatacctgacgag

SEQ ID NO: 1551 - DNA, 23 bp, Artificial Sequence
  Description of Artificial Sequence: Synthetic primer
  Description of Combined DNA/RNA Molecule: Synthetic primer
gggttggtggaatttggcggttc

SEQ ID NO: 1552 - DNA, 35 bp, Artificial Sequence
  Description of Artificial Sequence: Synthetic primer
  Description of Combined DNA/RNA Molecule: Synthetic primer
ggtgtcgtggccgaacactatcaccacgaauacgt

SEQ ID NO: 1553 - DNA, 53 bp, Artificial Sequence
  Description of Artificial Sequence: Synthetic oligonucleotide
  Description of Combined DNA/RNA Molecule: Synthetic oligonucleotide
tccaaacgattaggagcgtcaatggaatttggcggtttttagttgctcgtgcc

SEQ ID NO: 1554 - DNA, 43 bp, Artificial Sequence
  Description of Artificial Sequence: Synthetic oligonucleotide
gtgtttcgggtcggtgcgttcgttggacagaggtatacgccca

SEQ ID NO: 1555 - DNA, 25 bp, Artificial Sequence
  Description of Artificial Sequence: Synthetic probe
aagttgctcgtgtttcgggtcggtg

SEQ ID NO: 1556 - DNA, 22 bp, Artificial Sequence
  Description of Artificial Sequence: Synthetic primer
tccaaacgattaggagcgtcaa

SEQ ID NO: 1557 - DNA, 21 bp, Artificial Sequence
  Description of Artificial Sequence: Synthetic primer
tgggcgtatacctctgtccaa

SEQ ID NO: 1558 - DNA, 50 bp, Artificial Sequence
  Description of Artificial Sequence: Synthetic primer
  Description of Combined DNA/RNA Molecule: Synthetic primer
tgggcgtatacctctgtccaactatcaccacgaatacgccgaatgcacca

SEQ ID NO: 1559 - DNA, 21 bp, Artificial Sequence
  Description of Artificial Sequence: Synthetic primer
  Description of Combined DNA/RNA Molecule: Synthetic primer
tcgagggttcgaggacgttga

SEQ ID NO: 1560 - DNA, 30 bp, Artificial Sequence
  Description of Artificial Sequence: Synthetic primer
  Description of Combined DNA/RNA Molecule: Synthetic primer
ggtgtcgtgggcccttctccccgaauctag

SEQ ID NO: 1561 - DNA, 49 bp, Artificial Sequence
  Description of Artificial Sequence: Synthetic oligonucleotide
  Description of Combined DNA/RNA Molecule: Synthetic oligonucleotide
ttgcagcgggtcacaacaagacgttgaggttgtttgatttgggcggcaa

SEQ ID NO: 1562 - DNA, 49 bp, Artificial Sequence
  Description of Artificial Sequence: Synthetic oligonucleotide
caaaaaccctcaacgatcaacgaccgccttggacagaggtatacgccca

SEQ ID NO: 1563 - DNA, 23 bp, Artificial Sequence
  Description of Artificial Sequence: Synthetic probe
cctttgggcggcggtcgttgatc

SEQ ID NO: 1564 - DNA, 19 bp, Artificial Sequence
  Description of Artificial Sequence: Synthetic primer
ttgcagcgggtcacaacaa

SEQ ID NO: 1565 - DNA, 21 bp, Artificial Sequence
  Description of Artificial Sequence: Synthetic primer
tgggcgtatacctctgtccaa

SEQ ID NO: 1566 - DNA, 51 bp, Artificial Sequence
  Description of Artificial Sequence: Synthetic primer
  Description of Combined DNA/RNA Molecule: Synthetic primer
tgggcgtatacctctgtccaacttctccccgaatctaaacgctatgaccat

SEQ ID NO: 1567 - DNA, 22 bp, Artificial Sequence
  Description of Artificial Sequence: Synthetic primer
  Description of Combined DNA/RNA Molecule: Synthetic primer
gtttcgttagtcgcggcggttc

SEQ ID NO: 1568 - DNA, 39 bp, Artificial Sequence
  Description of Artificial Sequence: Synthetic primer
  Description of Combined DNA/RNA Molecule: Synthetic primer
ggtgtcgtggacgacgaaaataacgaattccaacccgat

SEQ ID NO: 1569 - DNA, 58 bp, Artificial Sequence
  Description of Artificial Sequence: Synthetic oligonucleotide
  Description of Combined DNA/RNA Molecule: Synthetic oligonucleotide
tcgtcccggtcagtagtcaacggttttttagattttatttgtcgaggagtctcgagct

SEQ ID NO: 1570 - DNA, 60 bp, Artificial Sequence
  Description of Artificial Sequence: Synthetic oligonucleotide
gagtcgcgtaaaatttttgtaagttgtgttttgtagaatgttgcccattttctgcaccca

SEQ ID NO: 1571 - DNA, 37 bp, Artificial Sequence
  Description of Artificial Sequence: Synthetic probe
ttgagtctcgagtcgcgtaaaatttttgtaagttgtg

SEQ ID NO: 1572 - DNA, 20 bp, Artificial Sequence
  Description of Artificial Sequence: Synthetic primer
tcgtcccggtcagtagtcaa

SEQ ID NO: 1573 - DNA, 20 bp, Artificial Sequence
  Description of Artificial Sequence: Synthetic primer
tgggtgcagaaaatgggcaa

SEQ ID NO: 1574 - DNA, 51 bp, Artificial Sequence
  Description of Artificial Sequence: Synthetic primer
  Description of Combined DNA/RNA Molecule: Synthetic primer
tgggtgcagaaaatgggcaacgacgaaaataacgaattccaacctgacttc

SEQ ID NO: 1575 - DNA, 21 bp, Artificial Sequence
  Description of Artificial Sequence: Synthetic primer
  Description of Combined DNA/RNA Molecule: Synthetic primer
gtcgtgaggttgggtcgttga

SEQ ID NO: 1576 - DNA, 38 bp, Artificial Sequence
  Description of Artificial Sequence: Synthetic primer
  Description of Combined DNA/RNA Molecule: Synthetic primer
ggtgtcgtggcgctaaataaatacgcgcgtaaaaacca

SEQ ID NO: 1577 - DNA, 45 bp, Artificial Sequence
  Description of Artificial Sequence: Synthetic oligonucleotide
  Description of Combined DNA/RNA Molecule: Synthetic oligonucleotide
ttcgtgcgtcgtgtagcaaggttgggtcgttggagtgatcgttct

SEQ ID NO: 1578 - DNA, 54 bp, Artificial Sequence
  Description of Artificial Sequence: Synthetic oligonucleotide
gtttcggtttagatattcgtattttcggcggtgcttgcccattttctgcaccca

SEQ ID NO: 1579 - DNA, 39 bp, Artificial Sequence
  Description of Artificial Sequence: Synthetic probe
ttagtgatcgtttcggtttagatattcgtattttcggcg

SEQ ID NO: 1580 - DNA, 19 bp, Artificial Sequence
  Description of Artificial Sequence: Synthetic primer
ttcgtgcgtcgtgtagcaa

SEQ ID NO: 1581 - DNA, 20 bp, Artificial Sequence
  Description of Artificial Sequence: Synthetic primer
tgggtgcagaaaatgggcaa

SEQ ID NO: 1582 - DNA, 43 bp, Artificial Sequence
  Description of Artificial Sequence: Synthetic primer
  Description of Combined DNA/RNA Molecule: Synthetic primer
tgggtgcagaaaatgggcaacgcgcgtaaaaaccgctgcacca

SEQ ID NO: 1583 - DNA, 21 bp, Artificial Sequence
  Description of Artificial Sequence: Synthetic primer
  Description of Combined DNA/RNA Molecule: Synthetic primer
gcgagttggagagcgcgtgta

SEQ ID NO: 1584 - DNA, 30 bp, Artificial Sequence
  Description of Artificial Sequence: Synthetic primer
  Description of Combined DNA/RNA Molecule: Synthetic primer
ggtgtcgtggcactcgcactcgcgcucgct

SEQ ID NO: 1585 - DNA, 39 bp, Artificial Sequence
  Description of Artificial Sequence: Synthetic oligonucleotide
  Description of Combined DNA/RNA Molecule: Synthetic oligonucleotide
ttcgtgcgtcgtgtagcaagcgcgtgtggcgatcgcgat

SEQ ID NO: 1586 - DNA, 52 bp, Artificial Sequence
  Description of Artificial Sequence: Synthetic oligonucleotide
gcggcgttagtgtttgtgtgtatgtgagaaagttgcccattttctgcaccca

SEQ ID NO: 1587 - DNA, 26 bp, Artificial Sequence
  Description of Artificial Sequence: Synthetic probe
aaggcgatcgcggcgttagtgtttgt

SEQ ID NO: 1588 - DNA, 19 bp, Artificial Sequence
  Description of Artificial Sequence: Synthetic primer
ttcgtgcgtcgtgtagcaa

SEQ ID NO: 1589 - DNA, 20 bp, Artificial Sequence
  Description of Artificial Sequence: Synthetic primer
tgggtgcagaaaatgggcaa

SEQ ID NO: 1590 - DNA, 41 bp, Artificial Sequence
  Description of Artificial Sequence: Synthetic primer
  Description of Combined DNA/RNA Molecule: Synthetic primer
tgggtgcagaaaatgggcaactcgcactcgcgcttgccccc

SEQ ID NO: 1591 - DNA, 27 bp, Artificial Sequence
  Description of Artificial Sequence: Synthetic primer
  Description of Combined DNA/RNA Molecule: Synthetic primer
cggtttttttttttgtcgcgtcgaggc

SEQ ID NO: 1592 - DNA, 37 bp, Artificial Sequence
  Description of Artificial Sequence: Synthetic primer
  Description of Combined DNA/RNA Molecule: Synthetic primer
ggtgtcgtggttaccgctactatcctacgaccccaag

SEQ ID NO: 1593 - DNA, 47 bp, Artificial Sequence
  Description of Artificial Sequence: Synthetic oligonucleotide
  Description of Combined DNA/RNA Molecule: Synthetic oligonucleotide
tggcgtaaggacactctgaaaccgcgtcgaggttagcgaatcgggat

SEQ ID NO: 1594 - DNA, 49 bp, Artificial Sequence
  Description of Artificial Sequence: Synthetic oligonucleotide
ggagcgcggcgttagtttaggaaattttacgtttcctctgtgcggacca

SEQ ID NO: 1595 - DNA, 19 bp, Artificial Sequence
  Description of Artificial Sequence: Synthetic probe
atgcgaatcggagcgcggc

SEQ ID NO: 1596 - DNA, 22 bp, Artificial Sequence
  Description of Artificial Sequence: Synthetic primer
tggcgtaaggacactctgaaac

SEQ ID NO: 1597 - DNA, 19 bp, Artificial Sequence
  Description of Artificial Sequence: Synthetic primer
tggtccgcacagaggaaac

SEQ ID NO: 1598 - DNA, 50 bp, Artificial Sequence
  Description of Artificial Sequence: Synthetic primer
  Description of Combined DNA/RNA Molecule: Synthetic primer
tggtccgcacagaggaaacctatcctacgaccccaaacaaatttguaaag

SEQ ID NO: 1599 - DNA, 20 bp, Artificial Sequence
  Description of Artificial Sequence: Synthetic primer
  Description of Combined DNA/RNA Molecule: Synthetic primer
tttgagcgcggtcgcgggac

SEQ ID NO: 1600 - DNA, 31 bp, Artificial Sequence
  Description of Artificial Sequence: Synthetic primer
  Description of Combined DNA/RNA Molecule: Synthetic primer
ggtgtcgtgggaaaaccgcctctcgcccgct

SEQ ID NO: 1601 - DNA, 46 bp, Artificial Sequence
  Description of Artificial Sequence: Synthetic oligonucleotide
  Description of Combined DNA/RNA Molecule: Synthetic oligonucleotide
tcacgcacgtagggtctaaacgataagggatgttggcgagcggtga

SEQ ID NO: 1602 - DNA, 38 bp, Artificial Sequence
  Description of Artificial Sequence: Synthetic oligonucleotide
ggtaggagcgagcgtcgcgttgtccggctgtggttaca

SEQ ID NO: 1603 - DNA, 19 bp, Artificial Sequence
  Description of Artificial Sequence: Synthetic probe
aaggcgagcggtaggagcg

SEQ ID NO: 1604 - DNA, 21 bp, Artificial Sequence
  Description of Artificial Sequence: Synthetic primer
tcacgcacgtagggtctaaac

SEQ ID NO: 1605 - DNA, 20 bp, Artificial Sequence
  Description of Artificial Sequence: Synthetic primer
tgtaaccacagccggacaac

SEQ ID NO: 1606 - DNA, 41 bp, Artificial Sequence
  Description of Artificial Sequence: Synthetic primer
  Description of Combined DNA/RNA Molecule: Synthetic primer
tgtaaccacagccggacaaccctctcgcccgcgatgctcgt

SEQ ID NO: 1607 - DNA, 27 bp, Artificial Sequence
  Description of Artificial Sequence: Synthetic primer
  Description of Combined DNA/RNA Molecule: Synthetic primer
cgagtttcggtaaacgagtttcgtagc

SEQ ID NO: 1608 - DNA, 33 bp, Artificial Sequence
  Description of Artificial Sequence: Synthetic primer
  Description of Combined DNA/RNA Molecule: Synthetic primer
ggtgtcgtggccacccgaaaaacatcgccgtcc

SEQ ID NO: 1609 - DNA, 61 bp, Artificial Sequence
  Description of Artificial Sequence: Synthetic oligonucleotide
  Description of Combined DNA/RNA Molecule: Synthetic oligonucleotide
tcttacgcccagggaatgtaacgtaaacgagtttcgtagttttttttgttgttctcgttaa

SEQ ID NO: 1610 - DNA, 61 bp, Artificial Sequence
  Description of Artificial Sequence: Synthetic oligonucleotide
gttggtttttgcggtttttgtttagatattaacgttagacggttgtccggctgtggttaca

SEQ ID NO: 1611 - DNA, 36 bp, Artificial Sequence
  Description of Artificial Sequence: Synthetic probe
aatgttctcgttggtttttgcggtttttgtttagat

SEQ ID NO: 1612 - DNA, 22 bp, Artificial Sequence
  Description of Artificial Sequence: Synthetic primer
tcttacgcccagggaatgtaac

SEQ ID NO: 1613 - DNA, 20 bp, Artificial Sequence
  Description of Artificial Sequence: Synthetic primer
tgtaaccacagccggacaac

SEQ ID NO: 1614 - DNA, 48 bp, Artificial Sequence
  Description of Artificial Sequence: Synthetic primer
  Description of Combined DNA/RNA Molecule: Synthetic primer
tgtaaccacagccggacaacccgaaaaacatcgccgtctaatgutaac

SEQ ID NO: 1615 - DNA, 28 bp, Artificial Sequence
  Description of Artificial Sequence: Synthetic primer
  Description of Combined DNA/RNA Molecule: Synthetic primer
gcgtcgaattttttagtatgagcgaatc

SEQ ID NO: 1616 - DNA, 33 bp, Artificial Sequence
  Description of Artificial Sequence: Synthetic primer
  Description of Combined DNA/RNA Molecule: Synthetic primer
ggtgtcgtggccccgaaatccgaacctcuctag

SEQ ID NO: 1617 - DNA, 65 bp, Artificial Sequence
  Description of Artificial Sequence: Synthetic oligonucleotide
  Description of Combined DNA/RNA Molecule: Synthetic oligonucleotide
tgagcaaaatcttcgtcgaccgaattttttagtatgagcgaattttaagttattgttctcgcgcc

SEQ ID NO: 1618 - DNA, 55 bp, Artificial Sequence
  Description of Artificial Sequence: Synthetic oligonucleotide
gcgtttgtcgagcgaatttttaaggtttgtaggtcggttcgatgccttccgtaca

SEQ ID NO: 1619 - DNA, 34 bp, Artificial Sequence
  Description of Artificial Sequence: Synthetic probe
cctgttctcgcgtttgtcgagcgaatttttaagg

SEQ ID NO: 1620 - DNA, 21 bp, Artificial Sequence
  Description of Artificial Sequence: Synthetic primer
tgagcaaaatcttcgtcgacc

SEQ ID NO: 1621 - DNA, 20 bp, Artificial Sequence
  Description of Artificial Sequence: Synthetic primer
tgtacggaaggcatcgaacc

SEQ ID NO: 1622 - DNA, 56 bp, Artificial Sequence
  Description of Artificial Sequence: Synthetic primer
  Description of Combined DNA/RNA Molecule: Synthetic primer
tgtacggaaggcatcgaaccgaaatccgaacctctctaactcctaaaaatgacctg

SEQ ID NO: 1623 - DNA, 28 bp, Artificial Sequence
  Description of Artificial Sequence: Synthetic primer
  Description of Combined DNA/RNA Molecule: Synthetic primer
gtaattgtgagttttcgggtttcgaggc

SEQ ID NO: 1624 - DNA, 31 bp, Artificial Sequence
  Description of Artificial Sequence: Synthetic primer
  Description of Combined DNA/RNA Molecule: Synthetic primer
ggtgtcgtggccatcccgatccgctccacct

SEQ ID NO: 1625 - DNA, 58 bp, Artificial Sequence
  Description of Artificial Sequence: Synthetic oligonucleotide
  Description of Combined DNA/RNA Molecule: Synthetic oligonucleotide
tggcacatgagagtagttgaccgtttcgaggtagtagggtattgagattgctcggtta

SEQ ID NO: 1626 - DNA, 37 bp, Artificial Sequence
  Description of Artificial Sequence: Synthetic oligonucleotide
ggtcgcggatgcggagcggttcgatgccttccgtaca

SEQ ID NO: 1627 - DNA, 22 bp, Artificial Sequence
  Description of Artificial Sequence: Synthetic probe
ttattgctcggtcgcggatgcg

SEQ ID NO: 1628 - DNA, 22 bp, Artificial Sequence
  Description of Artificial Sequence: Synthetic primer
tggcacatgagagtagttgacc

SEQ ID NO: 1629 - DNA, 20 bp, Artificial Sequence
  Description of Artificial Sequence: Synthetic primer
tgtacggaaggcatcgaacc

SEQ ID NO: 1630 - DNA, 42 bp, Artificial Sequence
  Description of Artificial Sequence: Synthetic primer
  Description of Combined DNA/RNA Molecule: Synthetic primer
tgtacggaaggcatcgaaccccgctccacccttcctgcccca

SEQ ID NO: 1631 - DNA, 22 bp, Artificial Sequence
  Description of Artificial Sequence: Synthetic primer
  Description of Combined DNA/RNA Molecule: Synthetic primer
tttgggttaacggaggcgagga

SEQ ID NO: 1632 - DNA, 31 bp, Artificial Sequence
  Description of Artificial Sequence: Synthetic primer
  Description of Combined DNA/RNA Molecule: Synthetic primer
ggtgtcgtgggcgccaaaaaaccgcccaacg

SEQ ID NO: 1633 - DNA, 41 bp, Artificial Sequence
  Description of Artificial Sequence: Synthetic oligonucleotide
  Description of Combined DNA/RNA Molecule: Synthetic oligonucleotide
tatagtcacgcaggaccacaggagcgagggagttgcgtaag

SEQ ID NO: 1634 - DNA, 62 bp, Artificial Sequence
  Description of Artificial Sequence: Synthetic oligonucleotide
gtagagggtaggtttcgattttttttcgtcgtattttgtggtgtttgcggctgtctatgaca

SEQ ID NO: 1635 - DNA, 37 bp, Artificial Sequence
  Description of Artificial Sequence: Synthetic probe
ttgagttgcgtagagggtaggtttcgattttttttcg

SEQ ID NO: 1636 - DNA, 20 bp, Artificial Sequence
  Description of Artificial Sequence: Synthetic primer
tatagtcacgcaggaccaca

SEQ ID NO: 1637 - DNA, 21 bp, Artificial Sequence
  Description of Artificial Sequence: Synthetic primer
tgtcatagacagccgcaaaca

SEQ ID NO: 1638 - DNA, 48 bp, Artificial Sequence
  Description of Artificial Sequence: Synthetic primer
  Description of Combined DNA/RNA Molecule: Synthetic primer
tgtcatagacagccgcaaacaaacacccgacccacaaaatatgacgag

SEQ ID NO: 1639 - DNA, 23 bp, Artificial Sequence
  Description of Artificial Sequence: Synthetic primer
  Description of Combined DNA/RNA Molecule: Synthetic primer
tcggttattcgtgcggtcggatg

SEQ ID NO: 1640 - DNA, 36 bp, Artificial Sequence
  Description of Artificial Sequence: Synthetic primer
  Description of Combined DNA/RNA Molecule: Synthetic primer
ggtgtcgtggttcctctcccaataacgctacuaaac

SEQ ID NO: 1641 - DNA, 51 bp, Artificial Sequence
  Description of Artificial Sequence: Synthetic oligonucleotide
  Description of Combined DNA/RNA Molecule: Synthetic oligonucleotide
tgccctatcgaaaaggacaacaggtcggatatcgtgttaggtttgcgagag

SEQ ID NO: 1642 - DNA, 53 bp, Artificial Sequence
  Description of Artificial Sequence: Synthetic oligonucleotide
gaggagggttttgtcgtagtttcggagaatagtgtttgcggctgtctatgaca

SEQ ID NO: 1643 - DNA, 31 bp, Artificial Sequence
  Description of Artificial Sequence: Synthetic probe
atggtttgcgaggagggttttgtcgtagttt

SEQ ID NO: 1644 - DNA, 22 bp, Artificial Sequence
  Description of Artificial Sequence: Synthetic primer
tgccctatcgaaaaggacaaca

SEQ ID NO: 1645 - DNA, 21 bp, Artificial Sequence
  Description of Artificial Sequence: Synthetic primer
tgtcatagacagccgcaaaca

SEQ ID NO: 1646 - DNA, 56 bp, Artificial Sequence
  Description of Artificial Sequence: Synthetic primer
  Description of Combined DNA/RNA Molecule: Synthetic primer
tgtcatagacagccgcaaacacccaataacgctactaaatactattccctgaaacc

SEQ ID NO: 1647 - DNA, 22 bp, Artificial Sequence
  Description of Artificial Sequence: Synthetic primer
  Description of Combined DNA/RNA Molecule: Synthetic primer
gggttcgggaagttcgcggaag

SEQ ID NO: 1648 - DNA, 39 bp, Artificial Sequence
  Description of Artificial Sequence: Synthetic primer
  Description of Combined DNA/RNA Molecule: Synthetic primer
ggtgtcgtggacctaaactaaaacaaaactccgaaaatg

SEQ ID NO: 1649 - DNA, 47 bp, Artificial Sequence
  Description of Artificial Sequence: Synthetic oligonucleotide
  Description of Combined DNA/RNA Molecule: Synthetic oligonucleotide
taatctccagacctccgaaccgttcgcggaaacgtaggaagcggtcg

SEQ ID NO: 1650 - DNA, 60 bp, Artificial Sequence
  Description of Artificial Sequence: Synthetic oligonucleotide
ggttaggagaggtagcgttacgtatattttttttatttggtgtaaggattgaacgggaca

SEQ ID NO: 1651 - DNA, 30 bp, Artificial Sequence
  Description of Artificial Sequence: Synthetic probe
aaaggaagcggttaggagaggtagcgttac

SEQ ID NO: 1652 - DNA, 21 bp, Artificial Sequence
  Description of Artificial Sequence: Synthetic primer
taatctccagacctccgaacc

SEQ ID NO: 1653 - DNA, 22 bp, Artificial Sequence
  Description of Artificial Sequence: Synthetic primer
tgtcccgttcaatccttacatc

SEQ ID NO: 1654 - DNA, 27 bp, Artificial Sequence
  Description of Artificial Sequence: Synthetic primer
  Description of Combined DNA/RNA Molecule: Synthetic primer
tttcgtttttgtcggcggtagcgattt

SEQ ID NO: 1655 - DNA, 30 bp, Artificial Sequence
  Description of Artificial Sequence: Synthetic primer
  Description of Combined DNA/RNA Molecule: Synthetic primer
ggtgtcgtggactcaatccgcgcgcccaat

SEQ ID NO: 1656 - DNA, 46 bp, Artificial Sequence
  Description of Artificial Sequence: Synthetic oligonucleotide
  Description of Combined DNA/RNA Molecule: Synthetic oligonucleotide
ttttccgcgtcagagcacaggcggtagcgattcggattctcgttcc

SEQ ID NO: 1657 - DNA, 63 bp, Artificial Sequence
  Description of Artificial Sequence: Synthetic oligonucleotide
gttttcgataaagttttagtttcgtagtagtattcggcgcgtgttatcggacctagctcgaca

SEQ ID NO: 1658 - DNA, 46 bp, Artificial Sequence
  Description of Artificial Sequence: Synthetic probe
ttgattctcgttttcgataaagttttagtttcgtagtagtattcgg

SEQ ID NO: 1659 - DNA, 19 bp, Artificial Sequence
  Description of Artificial Sequence: Synthetic primer
ttttccgcgtcagagcaca

SEQ ID NO: 1660 - DNA, 22 bp, Artificial Sequence
  Description of Artificial Sequence: Synthetic primer
tgtcgagctaggtccgataaca

SEQ ID NO: 1661 - DNA, 44 bp, Artificial Sequence
  Description of Artificial Sequence: Synthetic primer
  Description of Combined DNA/RNA Molecule: Synthetic primer
tgtcgagctaggtccgataacacgcccaacgaatccgtgccgag

SEQ ID NO: 1662 - DNA, 35 bp, Artificial Sequence
  Description of Artificial Sequence: Synthetic primer
  Description of Combined DNA/RNA Molecule: Synthetic primer
gagtatagagtatagtaaatcgggattttcggcga

SEQ ID NO: 1663 - DNA, 30 bp, Artificial Sequence
  Description of Artificial Sequence: Synthetic primer
  Description of Combined DNA/RNA Molecule: Synthetic primer
ggtgtcgtgggaccgcccaacccgacgcgg

SEQ ID NO: 1664 - DNA, 42 bp, Artificial Sequence
  Description of Artificial Sequence: Synthetic oligonucleotide
  Description of Combined DNA/RNA Molecule: Synthetic oligonucleotide
ttcgctgcccggttaaacaggattttcggcggacagcgttcc

SEQ ID NO: 1665 - DNA, 55 bp, Artificial Sequence
  Description of Artificial Sequence: Synthetic oligonucleotide
gtttttcgttcgtttgttcgttatgttggagagtgttatcggacctagctcgaca

SEQ ID NO: 1666 - DNA, 34 bp, Artificial Sequence
  Description of Artificial Sequence: Synthetic probe
ttggacagcgtttttcgttcgtttgttcgttatg

SEQ ID NO: 1667 - DNA, 19 bp, Artificial Sequence
  Description of Artificial Sequence: Synthetic primer
ttcgctgcccggttaaaca

SEQ ID NO: 1668 - DNA, 22 bp, Artificial Sequence
  Description of Artificial Sequence: Synthetic primer
tgtcgagctaggtccgataaca

SEQ ID NO: 1669 - DNA, 42 bp, Artificial Sequence
  Description of Artificial Sequence: Synthetic primer
  Description of Combined DNA/RNA Molecule: Synthetic primer
tgtcgagctaggtccgataacagcccaacccgacgtgaaaag

SEQ ID NO: 1670 - DNA, 25 bp, Artificial Sequence
  Description of Artificial Sequence: Synthetic primer
  Description of Combined DNA/RNA Molecule: Synthetic primer
cgacgtgtttcgttgaaagcgggtg

SEQ ID NO: 1671 - DNA, 31 bp, Artificial Sequence
  Description of Artificial Sequence: Synthetic primer
  Description of Combined DNA/RNA Molecule: Synthetic primer
ggtgtcgtggcgccgaaacccgacaaaccgg

SEQ ID NO: 1672 - DNA, 45 bp, Artificial Sequence
  Description of Artificial Sequence: Synthetic oligonucleotide
  Description of Combined DNA/RNA Molecule: Synthetic oligonucleotide
ttcgctgcccggttaaacatgaaagcgggtaggtggtatcgggta

SEQ ID NO: 1673 - DNA, 41 bp, Artificial Sequence
  Description of Artificial Sequence: Synthetic oligonucleotide
gggcggagttgcgttgaggtgttatcggacctagctcgaca

SEQ ID NO: 1674 - DNA, 22 bp, Artificial Sequence
  Description of Artificial Sequence: Synthetic probe
tttggtatcgggcggagttgcg

SEQ ID NO: 1675 - DNA, 19 bp, Artificial Sequence
  Description of Artificial Sequence: Synthetic primer
ttcgctgcccggttaaaca

SEQ ID NO: 1676 - DNA, 22 bp, Artificial Sequence
  Description of Artificial Sequence: Synthetic primer
tgtcgagctaggtccgataaca

SEQ ID NO: 1677 - DNA, 52 bp, Artificial Sequence
  Description of Artificial Sequence: Synthetic primer
  Description of Combined DNA/RNA Molecule: Synthetic primer
tgtcgagctaggtccgataacagaaacccgacaaaccgacaaatatgaaaag

SEQ ID NO: 1678 - DNA, 24 bp, Artificial Sequence
  Description of Artificial Sequence: Synthetic primer
  Description of Combined DNA/RNA Molecule: Synthetic primer
tttgcggttaggtgaaggcgtagg

SEQ ID NO: 1679 - DNA, 33 bp, Artificial Sequence
  Description of Artificial Sequence: Synthetic primer
  Description of Combined DNA/RNA Molecule: Synthetic primer
ggtgtcgtggccccgctttctctctcgacctcc

SEQ ID NO: 1680 - DNA, 45 bp, Artificial Sequence
  Description of Artificial Sequence: Synthetic oligonucleotide
  Description of Combined DNA/RNA Molecule: Synthetic oligonucleotide
tgctatgccgcattcaaccatagaggtagggaggtcgagcgagta

SEQ ID NO: 1681 - DNA, 42 bp, Artificial Sequence
  Description of Artificial Sequence: Synthetic oligonucleotide
gagcgtaggcgggcggagagtagtggagctagttcggcgaca

SEQ ID NO: 1682 - DNA, 19 bp, Artificial Sequence
  Description of Artificial Sequence: Synthetic probe
ttgtcgagcgagcgtaggc

SEQ ID NO: 1683 - DNA, 20 bp, Artificial Sequence
  Description of Artificial Sequence: Synthetic primer
tgctatgccgcattcaacca

SEQ ID NO: 1684 - DNA, 19 bp, Artificial Sequence
  Description of Artificial Sequence: Synthetic primer
tgtcgccgaactagctcca

SEQ ID NO: 1685 - DNA, 49 bp, Artificial Sequence
  Description of Artificial Sequence: Synthetic primer
  Description of Combined DNA/RNA Molecule: Synthetic primer
tgtcgccgaactagctccacctcttccgcgtaatctactctctgcccgt

SEQ ID NO: 1686 - DNA, 32 bp, Artificial Sequence
  Description of Artificial Sequence: Synthetic primer
  Description of Combined DNA/RNA Molecule: Synthetic primer
gcgtattaattttttatcgtttcgttcgttgc

SEQ ID NO: 1687 - DNA, 35 bp, Artificial Sequence
  Description of Artificial Sequence: Synthetic primer
  Description of Combined DNA/RNA Molecule: Synthetic primer
ggtgtcgtggctcactcactacgcgtttccuctag

SEQ ID NO: 1688 - DNA, 50 bp, Artificial Sequence
  Description of Artificial Sequence: Synthetic oligonucleotide
  Description of Combined DNA/RNA Molecule: Synthetic oligonucleotide
tgtgccttacggaaaacccagttcgttgtttaggtgcgaggactcgttga

SEQ ID NO: 1689 - DNA, 54 bp, Artificial Sequence
  Description of Artificial Sequence: Synthetic oligonucleotide
gttagacgttataggattgggagcgattcgtaaggtggagctagttcggcgaca

SEQ ID NO: 1690 - DNA, 32 bp, Artificial Sequence
  Description of Artificial Sequence: Synthetic probe
ttaggactcgttagacgttataggattgggag

SEQ ID NO: 1691 - DNA, 20 bp, Artificial Sequence
  Description of Artificial Sequence: Synthetic primer
tgtgccttacggaaaaccca

SEQ ID NO: 1692 - DNA, 19 bp, Artificial Sequence
  Description of Artificial Sequence: Synthetic primer
tgtcgccgaactagctcca

SEQ ID NO: 1693 - DNA, 59 bp, Artificial Sequence
  Description of Artificial Sequence: Synthetic primer
  Description of Combined DNA/RNA Molecule: Synthetic primer
tgtcgccgaactagctccagtttcctctaaataacataatacccttacgaattgcccct

SEQ ID NO: 1694 - DNA, 26 bp, Artificial Sequence
  Description of Artificial Sequence: Synthetic primer
  Description of Combined DNA/RNA Molecule: Synthetic primer
gtagaagtgattcgggttgtcgtttc

SEQ ID NO: 1695 - DNA, 30 bp, Artificial Sequence
  Description of Artificial Sequence: Synthetic primer
  Description of Combined DNA/RNA Molecule: Synthetic primer
ggtgtcgtggcgccccctcccccaaaaaac

SEQ ID NO: 1696 - DNA, 52 bp, Artificial Sequence
  Description of Artificial Sequence: Synthetic oligonucleotide
  Description of Combined DNA/RNA Molecule: Synthetic oligonucleotide
tcctgctctgaaaacctacaccgtgattcgggttgtcgtttttttgcggtta

SEQ ID NO: 1697 - DNA, 55 bp, Artificial Sequence
  Description of Artificial Sequence: Synthetic oligonucleotide
ggtcgttcgttagtttttcgtcgttgtcggtagggttacataggcggcttagaca

SEQ ID NO: 1698 - DNA, 32 bp, Artificial Sequence
  Description of Artificial Sequence: Synthetic probe
aatttttgcggtcgttcgttagtttttcgtcg

SEQ ID NO: 1699 - DNA, 22 bp, Artificial Sequence
  Description of Artificial Sequence: Synthetic primer
tcctgctctgaaaacctacacc

SEQ ID NO: 1700 - DNA, 22 bp, Artificial Sequence
  Description of Artificial Sequence: Synthetic primer
tgtctaagccgcctatgtaacc

SEQ ID NO: 1701 - DNA, 54 bp, Artificial Sequence
  Description of Artificial Sequence: Synthetic primer
  Description of Combined DNA/RNA Molecule: Synthetic primer
tgtctaagccgcctatgtaaccaatcaattaccaaccacccttctactgacaat

SEQ ID NO: 1702 - DNA, 21 bp, Artificial Sequence
  Description of Artificial Sequence: Synthetic primer
  Description of Combined DNA/RNA Molecule: Synthetic primer
ggagggcgtttttcgcgttgc

SEQ ID NO: 1703 - DNA, 30 bp, Artificial Sequence
  Description of Artificial Sequence: Synthetic primer
  Description of Combined DNA/RNA Molecule: Synthetic primer
ggtgtcgtggcgcccccgaaccctaatcca

SEQ ID NO: 1704 - DNA, 53 bp, Artificial Sequence
  Description of Artificial Sequence: Synthetic oligonucleotide
  Description of Combined DNA/RNA Molecule: Synthetic oligonucleotide
tttttacgcacagcaccacccgtttttcgcgttgtttttgattcgctcggtcc

SEQ ID NO: 1705 - DNA, 59 bp, Artificial Sequence
  Description of Artificial Sequence: Synthetic oligonucleotide
ggttttgcgtttgtttgaagtttttcgtttcgtatttggttacataggcggcttagaca

SEQ ID NO: 1706 - DNA, 35 bp, Artificial Sequence
  Description of Artificial Sequence: Synthetic probe
ccttcgctcggttttgcgtttgtttgaagtttttc

SEQ ID NO: 1707 - DNA, 20 bp, Artificial Sequence
  Description of Artificial Sequence: Synthetic primer
tttttacgcacagcaccacc

SEQ ID NO: 1708 - DNA, 22 bp, Artificial Sequence
  Description of Artificial Sequence: Synthetic primer
tgtctaagccgcctatgtaacc

SEQ ID NO: 1709 - DNA, 52 bp, Artificial Sequence
  Description of Artificial Sequence: Synthetic primer
  Description of Combined DNA/RNA Molecule: Synthetic primer
tgtctaagccgcctatgtaaccccccgaaccctaatccgaaaatatgaaaca

SEQ ID NO: 1710 - DNA, 29 bp, Artificial Sequence
  Description of Artificial Sequence: Synthetic primer
  Description of Combined DNA/RNA Molecule: Synthetic primer
gtacggtcgtttcgtttttagttcggttg

SEQ ID NO: 1711 - DNA, 32 bp, Artificial Sequence
  Description of Artificial Sequence: Synthetic primer
  Description of Combined DNA/RNA Molecule: Synthetic primer
ggtgtcgtgggcgaaacgaacgcgtaaacgag

SEQ ID NO: 1712 - DNA, 60 bp, Artificial Sequence
  Description of Artificial Sequence: Synthetic oligonucleotide
  Description of Combined DNA/RNA Molecule: Synthetic oligonucleotide
tggacacttcgcccttcttaacgtttcgtttttagttcggttatttacgtttatcgttca

SEQ ID NO: 1713 - DNA, 67 bp, Artificial Sequence
  Description of Artificial Sequence: Synthetic oligonucleotide
gtttggttttatattgtttggtttacgttaatttttgttttaattcgtttgggatctgggcatcaca

SEQ ID NO: 1714 - DNA, 46 bp, Artificial Sequence
  Description of Artificial Sequence: Synthetic probe
ttgtttatcgtttggttttatattgtttggtttacgttaatttttg

SEQ ID NO: 1715 - DNA, 22 bp, Artificial Sequence
  Description of Artificial Sequence: Synthetic primer
tggacacttcgcccttcttaac

SEQ ID NO: 1716 - DNA, 21 bp, Artificial Sequence
  Description of Artificial Sequence: Synthetic primer
tgtgatgcccagatcccaaac

SEQ ID NO: 1717 - DNA, 49 bp, Artificial Sequence
  Description of Artificial Sequence: Synthetic primer
  Description of Combined DNA/RNA Molecule: Synthetic primer
tgtgatgcccagatcccaaaccgaaacgaacgcgtaaacgaatgaattg

SEQ ID NO: 1718 - DNA, 20 bp, Artificial Sequence
  Description of Artificial Sequence: Synthetic primer
  Description of Combined DNA/RNA Molecule: Synthetic primer
gggattgcgggacgcgggca

SEQ ID NO: 1719 - DNA, 34 bp, Artificial Sequence
  Description of Artificial Sequence: Synthetic primer
  Description of Combined DNA/RNA Molecule: Synthetic primer
ggtgtcgtggccgcaacccctaaaacgaaaatag

SEQ ID NO: 1720 - DNA, 54 bp, Artificial Sequence
  Description of Artificial Sequence: Synthetic oligonucleotide
  Description of Combined DNA/RNA Molecule: Synthetic oligonucleotide
tggaggccggagaaattaaacgagcgagagttttgtgggttgttaaatcggcat

SEQ ID NO: 1721 - DNA, 37 bp, Artificial Sequence
  Description of Artificial Sequence: Synthetic oligonucleotide
ggcgcggtcgcgtcgcgtttgggatctgggcatcaca

SEQ ID NO: 1722 - DNA, 23 bp, Artificial Sequence
  Description of Artificial Sequence: Synthetic probe
aattaaatcggcgcggtcgcgtc

SEQ ID NO: 1723 - DNA, 21 bp, Artificial Sequence
  Description of Artificial Sequence: Synthetic primer
tggaggccggagaaattaaac

SEQ ID NO: 1724 - DNA, 21 bp, Artificial Sequence
  Description of Artificial Sequence: Synthetic primer
tgtgatgcccagatcccaaac

SEQ ID NO: 1725 - DNA, 59 bp, Artificial Sequence
  Description of Artificial Sequence: Synthetic primer
  Description of Combined DNA/RNA Molecule: Synthetic primer
tgtgatgcccagatcccaaacctaaaacgaaaataacaaaaaaaacgactactgcgaca

SEQ ID NO: 1726 - DNA, 30 bp, Artificial Sequence
  Description of Artificial Sequence: Synthetic primer
  Description of Combined DNA/RNA Molecule: Synthetic primer
gttttttattgtaagcggcgttatcggatc

SEQ ID NO: 1727 - DNA, 39 bp, Artificial Sequence
  Description of Artificial Sequence: Synthetic primer
  Description of Combined DNA/RNA Molecule: Synthetic primer
ggtgtcgtggctaattaacatacgacgccgattacccgg

SEQ ID NO: 1728 - DNA, 60 bp, Artificial Sequence
  Description of Artificial Sequence: Synthetic oligonucleotide
  Description of Combined DNA/RNA Molecule: Synthetic oligonucleotide
ttgtctctgcgacccatcaaggattttatttgtaaatttattagtgtgcgtttgcgggag

SEQ ID NO: 1729 - DNA, 41 bp, Artificial Sequence
  Description of Artificial Sequence: Synthetic oligonucleotide
ggagaggaggttcgggaattcgttggtacacgttcggcaca

SEQ ID NO: 1730 - DNA, 23 bp, Artificial Sequence
  Description of Artificial Sequence: Synthetic probe
aacgtttgcggagaggaggttcg

SEQ ID NO: 1731 - DNA, 20 bp, Artificial Sequence
  Description of Artificial Sequence: Synthetic primer
ttgtctctgcgacccatcaa

SEQ ID NO: 1732 - DNA, 19 bp, Artificial Sequence
  Description of Artificial Sequence: Synthetic primer
tgtgccgaacgtgtaccaa

SEQ ID NO: 1733 - DNA, 43 bp, Artificial Sequence
  Description of Artificial Sequence: Synthetic primer
  Description of Combined DNA/RNA Molecule: Synthetic primer
tgtgccgaacgtgtaccaacgccgattacccgaacctgaattt

SEQ ID NO: 1734 - DNA, 25 bp, Artificial Sequence
  Description of Artificial Sequence: Synthetic primer
  Description of Combined DNA/RNA Molecule: Synthetic primer
ttaagcgtagttggacgagcggtaa

SEQ ID NO: 1735 - DNA, 31 bp, Artificial Sequence
  Description of Artificial Sequence: Synthetic primer
  Description of Combined DNA/RNA Molecule: Synthetic primer
ggtgtcgtggtcccctacgccgactcuaaca

SEQ ID NO: 1736 - DNA, 44 bp, Artificial Sequence
  Description of Artificial Sequence: Synthetic oligonucleotide
  Description of Combined DNA/RNA Molecule: Synthetic oligonucleotide
ttcgcctaccgcagtgaacacgagcggtagtagttgagcgagca

SEQ ID NO: 1737 - DNA, 46 bp, Artificial Sequence
  Description of Artificial Sequence: Synthetic oligonucleotide
gagtgatagtttcggtttcgcgcgtcggttgagacatgggctcgca

SEQ ID NO: 1738 - DNA, 30 bp, Artificial Sequence
  Description of Artificial Sequence: Synthetic probe
atgttgagcgagtgatagtttcggtttcgc

SEQ ID NO: 1739 - DNA, 19 bp, Artificial Sequence
  Description of Artificial Sequence: Synthetic primer
ttcgcctaccgcagtgaac

SEQ ID NO: 1740 - DNA, 19 bp, Artificial Sequence
  Description of Artificial Sequence: Synthetic primer
tgcgagcccatgtctcaac

SEQ ID NO: 1741 - DNA, 42 bp, Artificial Sequence
  Description of Artificial Sequence: Synthetic primer
  Description of Combined DNA/RNA Molecule: Synthetic primer
tgcgagcccatgtctcaaccgccgactctaacgactgcgaca

SEQ ID NO: 1742 - DNA, 25 bp, Artificial Sequence
  Description of Artificial Sequence: Synthetic primer
  Description of Combined DNA/RNA Molecule: Synthetic primer
tttcggagttttattgtcgcggaaa

SEQ ID NO: 1743 - DNA, 33 bp, Artificial Sequence
  Description of Artificial Sequence: Synthetic primer
  Description of Combined DNA/RNA Molecule: Synthetic primer
ggtgtcgtggcatcccaaaacgctcgtcccgcg

SEQ ID NO: 1744 - DNA, 46 bp, Artificial Sequence
  Description of Artificial Sequence: Synthetic oligonucleotide
  Description of Combined DNA/RNA Molecule: Synthetic oligonucleotide
tcctgaattggccacaccacgtcgcggaggaagaaggtggcgtcac

SEQ ID NO: 1745 - DNA, 63 bp, Artificial Sequence
  Description of Artificial Sequence: Synthetic oligonucleotide
gtcgttttcgtttgtagaaattttattttcgagaaagtgcgggtgactgagcgacgtctaaca

SEQ ID NO: 1746 - DNA, 31 bp, Artificial Sequence
  Description of Artificial Sequence: Synthetic probe
ttaggtggcgtcgttttcgtttgtagaaatt

SEQ ID NO: 1747 - DNA, 20 bp, Artificial Sequence
  Description of Artificial Sequence: Synthetic primer
tcctgaattggccacaccac

SEQ ID NO: 1748 - DNA, 21 bp, Artificial Sequence
  Description of Artificial Sequence: Synthetic primer
tgttagacgtcgctcagtcac

SEQ ID NO: 1749 - DNA, 46 bp, Artificial Sequence
  Description of Artificial Sequence: Synthetic primer
  Description of Combined DNA/RNA Molecule: Synthetic primer
tgttagacgtcgctcagtcacgctcgtcccgcactttcttgaaaac

SEQ ID NO: 1750 - DNA, 25 bp, Artificial Sequence
  Description of Artificial Sequence: Synthetic primer
  Description of Combined DNA/RNA Molecule: Synthetic primer
ggagatacgagtttagaggcgcgag

SEQ ID NO: 1751 - DNA, 38 bp, Artificial Sequence
  Description of Artificial Sequence: Synthetic primer
  Description of Combined DNA/RNA Molecule: Synthetic primer
ggtgtcgtggcttcaacccaaaatatctccgaaccctg

SEQ ID NO: 1752 - DNA, 47 bp, Artificial Sequence
  Description of Artificial Sequence: Synthetic oligonucleotide
  Description of Combined DNA/RNA Molecule: Synthetic oligonucleotide
ttcttgcggttctggaacaccggagtggtgagattgagttgcgataa

SEQ ID NO: 1753 - DNA, 53 bp, Artificial Sequence
  Description of Artificial Sequence: Synthetic oligonucleotide
gatggaacgcgttgaggagatttagtttgttcgtgatgctccgttgttgctaa

SEQ ID NO: 1754 - DNA, 25 bp, Artificial Sequence
  Description of Artificial Sequence: Synthetic probe
aagagttgcgatggaacgcgttgag

SEQ ID NO: 1755 - DNA, 20 bp, Artificial Sequence
  Description of Artificial Sequence: Synthetic primer
ttcttgcggttctggaacac

SEQ ID NO: 1756 - DNA, 21 bp, Artificial Sequence
  Description of Artificial Sequence: Synthetic primer
ttagcaacaacggagcatcac

SEQ ID NO: 1757 - DNA, 53 bp, Artificial Sequence
  Description of Artificial Sequence: Synthetic primer
  Description of Combined DNA/RNA Molecule: Synthetic primer
ttagcaacaacggagcatcacccaaaatatctccgaaccctaaaactgaacag

SEQ ID NO: 1758 - DNA, 21 bp, Artificial Sequence
  Description of Artificial Sequence: Synthetic primer
  Description of Combined DNA/RNA Molecule: Synthetic primer
cggaggttgaagaggcgggtc

SEQ ID NO: 1759 - DNA, 30 bp, Artificial Sequence
  Description of Artificial Sequence: Synthetic primer
  Description of Combined DNA/RNA Molecule: Synthetic primer
ggtgtcgtggacccgccgaaccgaaaaaag

SEQ ID NO: 1760 - DNA, 57 bp, Artificial Sequence
  Description of Artificial Sequence: Synthetic oligonucleotide
  Description of Combined DNA/RNA Molecule: Synthetic oligonucleotide
tatggtaaaatgtcagcggcacgaagaggcgggttatgatttttttagtctcgagcc

SEQ ID NO: 1761 - DNA, 46 bp, Artificial Sequence
  Description of Artificial Sequence: Synthetic oligonucleotide
gagtttcgaggttggttagggtcgggtgatgctccgttgttgctaa

SEQ ID NO: 1762 - DNA, 30 bp, Artificial Sequence
  Description of Artificial Sequence: Synthetic probe
aatagtctcgagtttcgaggttggttaggg

SEQ ID NO: 1763 - DNA, 22 bp, Artificial Sequence
  Description of Artificial Sequence: Synthetic primer
tatggtaaaatgtcagcggcac

SEQ ID NO: 1764 - DNA, 21 bp, Artificial Sequence
  Description of Artificial Sequence: Synthetic primer
ttagcaacaacggagcatcac

SEQ ID NO: 1765 - DNA, 49 bp, Artificial Sequence
  Description of Artificial Sequence: Synthetic primer
  Description of Combined DNA/RNA Molecule: Synthetic primer
ttagcaacaacggagcatcaccgaaaaaaataacccgacgcctgacccc

SEQ ID NO: 1766 - DNA, 27 bp, Artificial Sequence
  Description of Artificial Sequence: Synthetic primer
  Description of Combined DNA/RNA Molecule: Synthetic primer
tttttagtcgtgttcggttttcgtcgc

SEQ ID NO: 1767 - DNA, 30 bp, Artificial Sequence
  Description of Artificial Sequence: Synthetic primer
  Description of Combined DNA/RNA Molecule: Synthetic primer
ggtgtcgtggccgctctccccgatcuacct

SEQ ID NO: 1768 - DNA, 56 bp, Artificial Sequence
  Description of Artificial Sequence: Synthetic oligonucleotide
  Description of Combined DNA/RNA Molecule: Synthetic oligonucleotide
tcctcgagccgatgacacacgtgttcggttttcgtcgtttttttatttcacgtgac

SEQ ID NO: 1769 - DNA, 53 bp, Artificial Sequence
  Description of Artificial Sequence: Synthetic oligonucleotide
gtggtggaatttttcgcgttttttatagtcgtcgtgtaacgtccgtgggctaa

SEQ ID NO: 1770 - DNA, 32 bp, Artificial Sequence
  Description of Artificial Sequence: Synthetic probe
ccatttcacgtggtggaatttttcgcgttttt

SEQ ID NO: 1771 - DNA, 19 bp, Artificial Sequence
  Description of Artificial Sequence: Synthetic primer
tcctcgagccgatgacaca

SEQ ID NO: 1772 - DNA, 19 bp, Artificial Sequence
  Description of Artificial Sequence: Synthetic primer
ttagcccacggacgttaca

SEQ ID NO: 1773 - DNA, 49 bp, Artificial Sequence
  Description of Artificial Sequence: Synthetic primer
  Description of Combined DNA/RNA Molecule: Synthetic primer
ttagcccacggacgttacaccccgatctacccattaattcgatgactac

SEQ ID NO: 1774 - DNA, 31 bp, Artificial Sequence
  Description of Artificial Sequence: Synthetic primer
  Description of Combined DNA/RNA Molecule: Synthetic primer
gaaatttttttgcgttattagattgcgtttg

SEQ ID NO: 1775 - DNA, 42 bp, Artificial Sequence
  Description of Artificial Sequence: Synthetic primer
  Description of Combined DNA/RNA Molecule: Synthetic primer
ggtgtcgtggaaaaacttataaatactttccgtcgaactcag

SEQ ID NO: 1776 - DNA, 57 bp, Artificial Sequence
  Description of Artificial Sequence: Synthetic oligonucleotide
  Description of Combined DNA/RNA Molecule: Synthetic oligonucleotide
tactatcgtatcacgccgacagtttagtatagtagatggtacgagtacgcgcggcac

SEQ ID NO: 1777 - DNA, 52 bp, Artificial Sequence
  Description of Artificial Sequence: Synthetic oligonucleotide
ggcgtttagtttaggttttcggaggtagttgagtgtaacgtccgtgggctaa

SEQ ID NO: 1778 - DNA, 28 bp, Artificial Sequence
  Description of Artificial Sequence: Synthetic probe
tttacgcgcggcgtttagtttaggtttt

SEQ ID NO: 1779 - DNA, 21 bp, Artificial Sequence
  Description of Artificial Sequence: Synthetic primer
tactatcgtatcacgccgaca

SEQ ID NO: 1780 - DNA, 19 bp, Artificial Sequence
  Description of Artificial Sequence: Synthetic primer
ttagcccacggacgttaca

SEQ ID NO: 1781 - DNA, 52 bp, Artificial Sequence
  Description of Artificial Sequence: Synthetic primer
  Description of Combined DNA/RNA Molecule: Synthetic primer
ttagcccacggacgttacagtcgaaatttccaactcaactacctctgaaaat

SEQ ID NO: 1782 - DNA, 30 bp, Artificial Sequence
  Description of Artificial Sequence: Synthetic primer
  Description of Combined DNA/RNA Molecule: Synthetic primer
gtgtagaggacgtttagtaagttacggaag

SEQ ID NO: 1783 - DNA, 42 bp, Artificial Sequence
  Description of Artificial Sequence: Synthetic primer
  Description of Combined DNA/RNA Molecule: Synthetic primer
ggtgtcgtggaccccttatatatcaattatacgaaccutttc

SEQ ID NO: 1784 - DNA, 51 bp, Artificial Sequence
  Description of Artificial Sequence: Synthetic oligonucleotide
  Description of Combined DNA/RNA Molecule: Synthetic oligonucleotide
ttgagaccgctgaccgacaggacgtttagtaagttacggaaaaagcggaag

SEQ ID NO: 1785 - DNA, 64 bp, Artificial Sequence
  Description of Artificial Sequence: Synthetic oligonucleotide
ggagatagaggtttcgttttcgtttttttaatttagtttttaaaatgttgcacggtcgagctaa

SEQ ID NO: 1786 - DNA, 37 bp, Artificial Sequence
  Description of Artificial Sequence: Synthetic probe
ccaaaaagcggagatagaggtttcgttttcgtttttt

SEQ ID NO: 1787 - DNA, 19 bp, Artificial Sequence
  Description of Artificial Sequence: Synthetic primer
ttgagaccgctgaccgaca

SEQ ID NO: 1788 - DNA, 19 bp, Artificial Sequence
  Description of Artificial Sequence: Synthetic primer
ttagctcgaccgtgcaaca

SEQ ID NO: 1789 - DNA, 27 bp, Artificial Sequence
  Description of Artificial Sequence: Synthetic primer
  Description of Combined DNA/RNA Molecule: Synthetic primer
tagttcgcgtttgtatcgagtcggttc

SEQ ID NO: 1790 - DNA, 36 bp, Artificial Sequence
  Description of Artificial Sequence: Synthetic primer
  Description of Combined DNA/RNA Molecule: Synthetic primer
ggtgtcgtggacgaaaaacttccttcccgaaaatag

SEQ ID NO: 1791 - DNA, 43 bp, Artificial Sequence
  Description of Artificial Sequence: Synthetic oligonucleotide
  Description of Combined DNA/RNA Molecule: Synthetic oligonucleotide
tcgcaacgtgccgaatacagagtcggtttcggtcgagcgttac

SEQ ID NO: 1792 - DNA, 54 bp, Artificial Sequence
  Description of Artificial Sequence: Synthetic oligonucleotide
gttgtttttatacgcgtttaggagtgttacgtgcgtgttgcacggtcgagctaa

SEQ ID NO: 1793 - DNA, 35 bp, Artificial Sequence
  Description of Artificial Sequence: Synthetic probe
ttgtcgagcgttgtttttatacgcgtttaggagtg

SEQ ID NO: 1794 - DNA, 19 bp, Artificial Sequence
  Description of Artificial Sequence: Synthetic primer
tcgcaacgtgccgaataca

SEQ ID NO: 1795 - DNA, 19 bp, Artificial Sequence
  Description of Artificial Sequence: Synthetic primer
ttagctcgaccgtgcaaca

SEQ ID NO: 1796 - DNA, 48 bp, Artificial Sequence
  Description of Artificial Sequence: Synthetic primer
  Description of Combined DNA/RNA Molecule: Synthetic primer
ttagctcgaccgtgcaacacttcccgaaaataaacgacgcatguaacg

SEQ ID NO: 1797 - DNA, 35 bp, Artificial Sequence
  Description of Artificial Sequence: Synthetic primer
  Description of Combined DNA/RNA Molecule: Synthetic primer
gttttattatattaatattgtcgttttcgcgtatc

SEQ ID NO: 1798 - DNA, 39 bp, Artificial Sequence
  Description of Artificial Sequence: Synthetic primer
  Description of Combined DNA/RNA Molecule: Synthetic primer
ggtgtcgtgggctaaaaacgaaaaaaaatcccgaaaaag

SEQ ID NO: 1799 - DNA, 55 bp, Artificial Sequence
  Description of Artificial Sequence: Synthetic oligonucleotide
  Description of Combined DNA/RNA Molecule: Synthetic oligonucleotide
taacgggattgagagtggacaaatattgtcgttttcgcgtattcgttctcgttca

SEQ ID NO: 1800 - DNA, 65 bp, Artificial Sequence
  Description of Artificial Sequence: Synthetic oligonucleotide
gtttgcgtatgtttatatacgtttatattcgagatattagcgtttttgtctgccgcccttactaa

SEQ ID NO: 1801 - DNA, 42 bp, Artificial Sequence
  Description of Artificial Sequence: Synthetic probe
aacgttctcgtttgcgtatgtttatatacgtttatattcgag

SEQ ID NO: 1802 - DNA, 21 bp, Artificial Sequence
  Description of Artificial Sequence: Synthetic primer
taacgggattgagagtggaca

SEQ ID NO: 1803 - DNA, 19 bp, Artificial Sequence
  Description of Artificial Sequence: Synthetic primer
ttagtaagggcggcagaca

SEQ ID NO: 1804 - DNA, 55 bp, Artificial Sequence
  Description of Artificial Sequence: Synthetic primer
  Description of Combined DNA/RNA Molecule: Synthetic primer
ttagtaagggcggcagacagctaaaaacgaaaaaaaatcccgaaaaaatgctaac

SEQ ID NO: 1805 - DNA, 24 bp, Artificial Sequence
  Description of Artificial Sequence: Synthetic primer
  Description of Combined DNA/RNA Molecule: Synthetic primer
tcgttgttgatgtttgcgcgtttc

SEQ ID NO: 1806 - DNA, 40 bp, Artificial Sequence
  Description of Artificial Sequence: Synthetic primer
  Description of Combined DNA/RNA Molecule: Synthetic primer
ggtgtcgtggtctaacaaactcttcttctaccgaauatat

SEQ ID NO: 1807 - DNA, 65 bp, Artificial Sequence
  Description of Artificial Sequence: Synthetic oligonucleotide
  Description of Combined DNA/RNA Molecule: Synthetic oligonucleotide
taacgggattgagagtggacattttagaggttattattttggatttttagatcgttaatcggaac

SEQ ID NO: 1808 - DNA, 56 bp, Artificial Sequence
  Description of Artificial Sequence: Synthetic oligonucleotide
ggagtttggttttttcggaagataggaagttagtgagtgtctgccgcccttactaa

SEQ ID NO: 1809 - DNA, 38 bp, Artificial Sequence
  Description of Artificial Sequence: Synthetic probe
aagttaatcggagtttggttttttcggaagataggaag

SEQ ID NO: 1810 - DNA, 21 bp, Artificial Sequence
  Description of Artificial Sequence: Synthetic primer
taacgggattgagagtggaca

SEQ ID NO: 1811 - DNA, 19 bp, Artificial Sequence
  Description of Artificial Sequence: Synthetic primer
ttagtaagggcggcagaca

SEQ ID NO: 1812 - DNA, 29 bp, Artificial Sequence
  Description of Artificial Sequence: Synthetic primer
  Description of Combined DNA/RNA Molecule: Synthetic primer
gtggtcgtcgttttgtttttttacgtttc

SEQ ID NO: 1813 - DNA, 31 bp, Artificial Sequence; identical to SEQ ID NO: 902
  Description of Artificial Sequence: Synthetic primer
  Description of Combined DNA/RNA Molecule: Synthetic primer

SEQ ID NO: 1814 - DNA, 49 bp, Artificial Sequence; identical to SEQ ID NO: 903
  Description of Artificial Sequence: Synthetic oligonucleotide
  Description of Combined DNA/RNA Molecule: Synthetic oligonucleotide

SEQ ID NO: 1815 - DNA, 55 bp, Artificial Sequence; identical to SEQ ID NO: 904
  Description of Artificial Sequence: Synthetic oligonucleotide

SEQ ID NO: 1816 - DNA, 31 bp, Artificial Sequence; identical to SEQ ID NO: 905
  Description of Artificial Sequence: Synthetic probe

SEQ ID NO: 1817 - DNA, 19 bp, Artificial Sequence
  Description of Artificial Sequence: Synthetic primer
tccggatcaaagcagccac

SEQ ID NO: 1818 - DNA, 19 bp, Artificial Sequence
  Description of Artificial Sequence: Synthetic primer
tcaccgtacgccaacacac

SEQ ID NO: 1819 - DNA, 46 bp, Artificial Sequence; identical to SEQ ID NO: 908
  Description of Artificial Sequence: Synthetic primer
  Description of Combined DNA/RNA Molecule: Synthetic primer

SEQ ID NO: 1820 - DNA, 28 bp, Artificial Sequence
  Description of Artificial Sequence: Synthetic primer
  Description of Combined DNA/RNA Molecule: Synthetic primer
tttagagtcgaggtttgtaaatcgaggc

SEQ ID NO: 1821 - DNA, 32 bp, Artificial Sequence; identical to SEQ ID NO: 990
  Description of Artificial Sequence: Synthetic primer
  Description of Combined DNA/RNA Molecule: Synthetic primer

SEQ ID NO: 1822 - DNA, 51 bp, Artificial Sequence; identical to SEQ ID NO: 991
  Description of Artificial Sequence: Synthetic oligonucleotide
  Description of Combined DNA/RNA Molecule: Synthetic oligonucleotide

SEQ ID NO: 1823 - DNA, 58 bp, Artificial Sequence; identical to SEQ ID NO: 992
  Description of Artificial Sequence: Synthetic oligonucleotide

SEQ ID NO: 1824 - DNA, 31 bp, Artificial Sequence; identical to SEQ ID NO: 993
  Description of Artificial Sequence: Synthetic probe

SEQ ID NO: 1825 - DNA, 21 bp, Artificial Sequence
  Description of Artificial Sequence: Synthetic primer
tcactatcggcgtagtcacca

SEQ ID NO: 1826 - DNA, 20 bp, Artificial Sequence
  Description of Artificial Sequence: Synthetic primer
tcctccgggtaaagtcacca

SEQ ID NO: 1827 - DNA, 57 bp, Artificial Sequence; identical to SEQ ID NO: 996
  Description of Artificial Sequence: Synthetic primer
  Description of Combined DNA/RNA Molecule: Synthetic primer

SEQ ID NO: 1828 - DNA, 28 bp, Artificial Sequence
  Description of Artificial Sequence: Synthetic primer
  Description of Combined DNA/RNA Molecule: Synthetic primer
gtaattgtgagttttcgggtttcgaggc

SEQ ID NO: 1829 - DNA, 31 bp, Artificial Sequence; identical to SEQ ID NO: 1624
  Description of Artificial Sequence: Synthetic primer
  Description of Combined DNA/RNA Molecule: Synthetic primer

SEQ ID NO: 1830 - DNA, 58 bp, Artificial Sequence; identical to SEQ ID NO: 1625
  Description of Artificial Sequence: Synthetic oligonucleotide
  Description of Combined DNA/RNA Molecule: Synthetic oligonucleotide

SEQ ID NO: 1831 - DNA, 37 bp, Artificial Sequence; identical to SEQ ID NO: 1626
  Description of Artificial Sequence: Synthetic oligonucleotide

SEQ ID NO: 1832 - DNA, 22 bp, Artificial Sequence
  Description of Artificial Sequence: Synthetic probe
ttattgctcggtcgcggatgcg

SEQ ID NO: 1833 - DNA, 22 bp, Artificial Sequence
  Description of Artificial Sequence: Synthetic primer
tggcacatgagagtagttgacc

SEQ ID NO: 1834 - DNA, 20 bp, Artificial Sequence
  Description of Artificial Sequence: Synthetic primer
tgtacggaaggcatcgaacc

SEQ ID NO: 1835 - DNA, 42 bp, Artificial Sequence; identical to SEQ ID NO: 1630
  Description of Artificial Sequence: Synthetic primer
  Description of Combined DNA/RNA Molecule: Synthetic primer

SEQ ID NO: 1836 - DNA, 25 bp, Artificial Sequence
  Description of Artificial Sequence: Synthetic primer
  Description of Combined DNA/RNA Molecule: Synthetic primer
gtttcgcgtcgcgtttattcgtttc

SEQ ID NO: 1837 - DNA, 34 bp, Artificial Sequence; identical to SEQ ID NO: 602
  Description of Artificial Sequence: Synthetic primer
  Description of Combined DNA/RNA Molecule: Synthetic primer

SEQ ID NO: 1838 - DNA, 54 bp, Artificial Sequence; identical to SEQ ID NO: 603
  Description of Artificial Sequence: Synthetic oligonucleotide
  Description of Combined DNA/RNA Molecule: Synthetic oligonucleotide

SEQ ID NO: 1839 - DNA, 60 bp, Artificial Sequence; identical to SEQ ID NO: 604
  Description of Artificial Sequence: Synthetic oligonucleotide

SEQ ID NO: 1840 - DNA, 27 bp, Artificial Sequence
  Description of Artificial Sequence: Synthetic probe
ttgattcacggtacgttttcgcgtcgt

SEQ ID NO: 1841 - DNA, 19 bp, Artificial Sequence
  Description of Artificial Sequence: Synthetic primer
tccggcctttgacgatacc

SEQ ID NO: 1842 - DNA, 22 bp, Artificial Sequence
  Description of Artificial Sequence: Synthetic primer
tgctccgttcgagtgaattacc

SEQ ID NO: 1843 - DNA, 50 bp, Artificial Sequence; identical to SEQ ID NO: 608
  Description of Artificial Sequence: Synthetic primer
  Description of Combined DNA/RNA Molecule: Synthetic primer

SEQ ID NO: 1844 - DNA, 23 bp, Artificial Sequence
  Description of Artificial Sequence: Synthetic primer
  Description of Combined DNA/RNA Molecule: Synthetic primer
gttttgggttgtagaggcgagac

SEQ ID NO: 1845 - DNA, 36 bp, Artificial Sequence
  Description of Artificial Sequence: Synthetic primer
  Description of Combined DNA/RNA Molecule: Synthetic primer
ggtgtcgtggcgacccgatctctaaaactcaacctc

SEQ ID NO: 1846 - DNA, 48 bp, Artificial Sequence
  Description of Artificial Sequence: Synthetic oligonucleotide
  Description of Combined DNA/RNA Molecule: Synthetic oligonucleotide
tcagacgcactaaacaggcaatagaggcgagatttttggcatcgtcac

SEQ ID NO: 1847 - DNA, 55 bp, Artificial Sequence
  Description of Artificial Sequence: Synthetic oligonucleotide
gtcgtcgtgacgtattttttttatgttcggttcgtgttgcggatcgtcgtgtgaa

SEQ ID NO: 1848 - DNA, 37 bp, Artificial Sequence
  Description of Artificial Sequence: Synthetic probe
aatggcatcgtcgtcgtgacgtattttttttatgttc

SEQ ID NO: 1849 - DNA, 21 bp, Artificial Sequence
  Description of Artificial Sequence: Synthetic primer
tcagacgcactaaacaggcaa

SEQ ID NO: 1850 - DNA, 19 bp, Artificial Sequence
  Description of Artificial Sequence: Synthetic primer
ttcacacgacgatccgcaa

SEQ ID NO: 1851 - DNA, 51 bp, Artificial Sequence
  Description of Artificial Sequence: Synthetic primer
  Description of Combined DNA/RNA Molecule: Synthetic primer
ttcacacgacgatccgcaaactcaaccttcacaaccaaaatacatgaacca

SEQ ID NO: 1852 - DNA, 30 bp, Artificial Sequence
  Description of Artificial Sequence: Synthetic primer
  Description of Combined DNA/RNA Molecule: Synthetic primer
gggattttttcgtaatttcgggatcggtta

SEQ ID NO: 1853 - DNA, 41 bp, Artificial Sequence
  Description of Artificial Sequence: Synthetic primer
  Description of Combined DNA/RNA Molecule: Synthetic primer
ggtgtcgtggaataaaaactaaaccgtaaataccgacgaca

SEQ ID NO: 1854 - DNA, 52 bp, Artificial Sequence
  Description of Artificial Sequence: Synthetic oligonucleotide
  Description of Combined DNA/RNA Molecule: Synthetic oligonucleotide
ttccatcgagcgccaacaagtaggtttgatgtttagaggttcgtatcgggcg

SEQ ID NO: 1855 - DNA, 62 bp, Artificial Sequence
  Description of Artificial Sequence: Synthetic oligonucleotide
gggaagtttaggttttcggataatttttttttagtttttcgtcttgcggatcgtcgtgtgaa

SEQ ID NO: 1856 - DNA, 43 bp, Artificial Sequence
  Description of Artificial Sequence: Synthetic probe
aatcgtatcgggaagtttaggttttcggataatttttttttag

SEQ ID NO: 1857 - DNA, 19 bp, Artificial Sequence
  Description of Artificial Sequence: Synthetic primer
ttccatcgagcgccaacaa

SEQ ID NO: 1858 - DNA, 19 bp, Artificial Sequence
  Description of Artificial Sequence: Synthetic primer
ttcacacgacgatccgcaa

SEQ ID NO: 1859 - DNA, 53 bp, Artificial Sequence
  Description of Artificial Sequence: Synthetic primer
  Description of Combined DNA/RNA Molecule: Synthetic primer
ttcacacgacgatccgcaataaaaactaaaccgtaaataccgacgatgaaaag

SEQ ID NO: 1860 - DNA, 33 bp, Artificial Sequence
  Description of Artificial Sequence: Synthetic primer
  Description of Combined DNA/RNA Molecule: Synthetic primer
attagaagggatattttcgtgtaatttcggttg

SEQ ID NO: 1861 - DNA, 34 bp, Artificial Sequence
  Description of Artificial Sequence: Synthetic primer
  Description of Combined DNA/RNA Molecule: Synthetic primer
ggtgtcgtgggtaaaacactcgctcgctccctat

SEQ ID NO: 1862 - DNA, 56 bp, Artificial Sequence
  Description of Artificial Sequence: Synthetic oligonucleotide
  Description of Combined DNA/RNA Molecule: Synthetic oligonucleotide
ttcagagcacctgcgtaccgatattttcgtgtaatttcggttagggaaggcgagaa

SEQ ID NO: 1863 - DNA, 41 bp, Artificial Sequence
  Description of Artificial Sequence: Synthetic oligonucleotide
gagggaaggtggcggtttcgggggttcttcggctggctcaa

SEQ ID NO: 1864 - DNA, 22 bp, Artificial Sequence
  Description of Artificial Sequence: Synthetic probe
ttggaaggcgagggaaggtggc

SEQ ID NO: 1865 - DNA, 19 bp, Artificial Sequence
  Description of Artificial Sequence: Synthetic primer
ttcagagcacctgcgtacc

SEQ ID NO: 1866 - DNA, 19 bp, Artificial Sequence
  Description of Artificial Sequence: Synthetic primer
ttgagccagccgaagaacc

SEQ ID NO: 1867 - DNA, 42 bp, Artificial Sequence
  Description of Artificial Sequence: Synthetic primer
  Description of Combined DNA/RNA Molecule: Synthetic primer
ttgagccagccgaagaacctcgctcgctccctacctgaaact

SEQ ID NO: 1868 - DNA, 24 bp, Artificial Sequence
  Description of Artificial Sequence: Synthetic primer
  Description of Combined DNA/RNA Molecule: Synthetic primer
ttggattttaggaggtcgcggagg

SEQ ID NO: 1869 - DNA, 35 bp, Artificial Sequence
  Description of Artificial Sequence: Synthetic primer
  Description of Combined DNA/RNA Molecule: Synthetic primer
ggtgtcgtggcgaattccaaattcgcgacccccgt

SEQ ID NO: 1870 - DNA, 49 bp, Artificial Sequence
  Description of Artificial Sequence: Synthetic oligonucleotide
  Description of Combined DNA/RNA Molecule: Synthetic oligonucleotide
tctcaatgtcgagccgtaccggattttaggaggtcgcggaggtcgttac

SEQ ID NO: 1871 - DNA, 46 bp, Artificial Sequence
  Description of Artificial Sequence: Synthetic oligonucleotide
gttgttagagtttcggaggcgcgaagaggttcttcggctggctcaa

SEQ ID NO: 1872 - DNA, 29 bp, Artificial Sequence
  Description of Artificial Sequence: Synthetic probe
ttggaggtcgttgttagagtttcggaggc

SEQ ID NO: 1873 - DNA, 20 bp, Artificial Sequence
  Description of Artificial Sequence: Synthetic primer
tctcaatgtcgagccgtacc

SEQ ID NO: 1874 - DNA, 19 bp, Artificial Sequence
  Description of Artificial Sequence: Synthetic primer
ttgagccagccgaagaacc

SEQ ID NO: 1875 - DNA, 40 bp, Artificial Sequence
  Description of Artificial Sequence: Synthetic primer
  Description of Combined DNA/RNA Molecule: Synthetic primer
ttgagccagccgaagaaccacccccgccgtctttgcgccc

SEQ ID NO: 1876 - DNA, 28 bp, Artificial Sequence
  Description of Artificial Sequence: Synthetic primer
  Description of Combined DNA/RNA Molecule: Synthetic primer
gttagtatggagcgaaagagttcggtta

SEQ ID NO: 1877 - DNA, 32 bp, Artificial Sequence; identical to SEQ ID NO: 610
  Description of Artificial Sequence: Synthetic primer
  Description of Combined DNA/RNA Molecule: Synthetic primer

SEQ ID NO: 1878 - DNA, 54 bp, Artificial Sequence
  Description of Artificial Sequence: Synthetic oligonucleotide
  Description of Combined DNA/RNA Molecule: Synthetic oligonucleotide
tttcgctcgacgcataccagcgaaagagttcggttgttatttcgtaatcgttta

SEQ ID NO: 1879 - DNA, 42 bp, Artificial Sequence
  Description of Artificial Sequence: Synthetic oligonucleotide
gttcgcgcggaaggtttcgtcgttggcgcggctactgtaaaa

SEQ ID NO: 1880 - DNA, 27 bp, Artificial Sequence
  Description of Artificial Sequence: Synthetic probe
aacgtaatcgttcgcgcggaaggtttc

SEQ ID NO: 1881 - DNA, 19 bp, Artificial Sequence
  Description of Artificial Sequence: Synthetic primer
tttcgctcgacgcatacca

SEQ ID NO: 1882 - DNA, 19 bp, Artificial Sequence
  Description of Artificial Sequence: Synthetic primer
ttttacagtagccgcgcca

SEQ ID NO: 1883 - DNA, 42 bp, Artificial Sequence
  Description of Artificial Sequence: Synthetic primer
  Description of Combined DNA/RNA Molecule: Synthetic primer
ttttacagtagccgcgccaaccgcgcgaaaccgattgcccag

SEQ ID NO: 1884 - DNA, 26 bp, Artificial Sequence
  Description of Artificial Sequence: Synthetic primer
  Description of Combined DNA/RNA Molecule: Synthetic primer
gagtaagcgggatagttttgcggaag

SEQ ID NO: 1885 - DNA, 37 bp, Artificial Sequence
  Description of Artificial Sequence: Synthetic primer
  Description of Combined DNA/RNA Molecule: Synthetic primer
ggtgtcgtggaaaaaccatcgctcgaaaatacuaaag

SEQ ID NO: 1886 - DNA, 50 bp, Artificial Sequence
  Description of Artificial Sequence: Synthetic oligonucleotide
  Description of Combined DNA/RNA Molecule: Synthetic oligonucleotide
ttcttgcccgcttgttccagcgggatagttttgcggaaagttctcgttcc

SEQ ID NO: 1887 - DNA, 58 bp, Artificial Sequence
  Description of Artificial Sequence: Synthetic oligonucleotide
gtttttaattttttagttttgcgttcggattgaagcggctggcgcggctactgtaaaa

SEQ ID NO: 1888 - DNA, 38 bp, Artificial Sequence
  Description of Artificial Sequence: Synthetic probe
ttagttctcgtttttaattttttagttttgcgttcgga

SEQ ID NO: 1889 - DNA, 19 bp, Artificial Sequence
  Description of Artificial Sequence: Synthetic primer
ttcttgcccgcttgttcca

SEQ ID NO: 1890 - DNA, 19 bp, Artificial Sequence
  Description of Artificial Sequence: Synthetic primer
ttttacagtagccgcgcca

SEQ ID NO: 1891 - DNA, 54 bp, Artificial Sequence
  Description of Artificial Sequence: Synthetic primer
  Description of Combined DNA/RNA Molecule: Synthetic primer
ttttacagtagccgcgccagctcgaaaatactaaaaataaaaaccgctgcttcg

SEQ ID NO: 1892 - DNA, 20 bp, Artificial Sequence
  Description of Artificial Sequence: Synthetic primer
  Description of Combined DNA/RNA Molecule: Synthetic primer
gaggtgtggagcggcgcggt

SEQ ID NO: 1893 - DNA, 34 bp, Artificial Sequence
  Description of Artificial Sequence: Synthetic primer
  Description of Combined DNA/RNA Molecule: Synthetic primer
ggtgtcgtggaaaaccgaaaaacgcgctcccgct

SEQ ID NO: 1894 - DNA, 43 bp, Artificial Sequence
  Description of Artificial Sequence: Synthetic oligonucleotide
  Description of Combined DNA/RNA Molecule: Synthetic oligonucleotide
tcccttagagagaacgcccagcgggaggtttcgtgagcggtcg

SEQ ID NO: 1895 - DNA, 45 bp, Artificial Sequence
  Description of Artificial Sequence: Synthetic oligonucleotide
ggttacgggagatagcgtcggcgtggtgacgtacgagtgttctta

SEQ ID NO: 1896 - DNA, 26 bp, Artificial Sequence
  Description of Artificial Sequence: Synthetic probe
aacgtgagcggttacgggagatagcg

SEQ ID NO: 1897 - DNA, 20 bp, Artificial Sequence
  Description of Artificial Sequence: Synthetic primer
tcccttagagagaacgccca

SEQ ID NO: 1898 - DNA, 22 bp, Artificial Sequence
  Description of Artificial Sequence: Synthetic primer
taagaacactcgtacgtcacca

SEQ ID NO: 1899 - DNA, 42 bp, Artificial Sequence
  Description of Artificial Sequence: Synthetic primer
  Description of Combined DNA/RNA Molecule: Synthetic primer
taagaacactcgtacgtcaccaaacgcgctcccgctgacgcc

SEQ ID NO: 1900 - DNA, 27 bp, Artificial Sequence
  Description of Artificial Sequence: Synthetic primer
  Description of Combined DNA/RNA Molecule: Synthetic primer
ggagttttattgaggtcgagtcgtgtc

SEQ ID NO: 1901 - DNA, 35 bp, Artificial Sequence
  Description of Artificial Sequence: Synthetic primer
  Description of Combined DNA/RNA Molecule: Synthetic primer
ggtgtcgtggcaactaccacccgactacgacgact

SEQ ID NO: 1902 - DNA, 59 bp, Artificial Sequence
  Description of Artificial Sequence: Synthetic oligonucleotide
  Description of Combined DNA/RNA Molecule: Synthetic oligonucleotide
tctcataccagacgcggtaacggtgttgttgtttttcgtaatttattggaaatcgcgcg

SEQ ID NO: 1903 - DNA, 41 bp, Artificial Sequence
  Description of Artificial Sequence: Synthetic oligonucleotide
gcgtaggagttcgaggcgtttggttcgtgtcgctgtgctta

SEQ ID NO: 1904 - DNA, 26 bp, Artificial Sequence
  Description of Artificial Sequence: Synthetic probe
aaggaaatcgcgtaggagttcgaggc

SEQ ID NO: 1905 - DNA, 21 bp, Artificial Sequence
  Description of Artificial Sequence: Synthetic primer
tctcataccagacgcggtaac

SEQ ID NO: 1906 - DNA, 19 bp, Artificial Sequence
  Description of Artificial Sequence: Synthetic primer
taagcacagcgacacgaac

SEQ ID NO: 1907 - DNA, 46 bp, Artificial Sequence
  Description of Artificial Sequence: Synthetic primer
  Description of Combined DNA/RNA Molecule: Synthetic primer
taagcacagcgacacgaaccaactaccacccgactacgatggcctt

SEQ ID NO: 1908 - DNA, 23 bp, Artificial Sequence
  Description of Artificial Sequence: Synthetic primer
  Description of Combined DNA/RNA Molecule: Synthetic primer
ggttttggtggaggttgcggtta

SEQ ID NO: 1909 - DNA, 37 bp, Artificial Sequence
  Description of Artificial Sequence: Synthetic primer
  Description of Combined DNA/RNA Molecule: Synthetic primer
ggtgtcgtggtaaacgcctctactccgaaatcgaaat

SEQ ID NO: 1910 - DNA, 45 bp, Artificial Sequence
  Description of Artificial Sequence: Synthetic oligonucleotide
  Description of Combined DNA/RNA Molecule: Synthetic oligonucleotide
ttttcggcggcagctaaacggtggaggttgcggttgtctcggtct

SEQ ID NO: 1911 - DNA, 35 bp, Artificial Sequence
  Description of Artificial Sequence: Synthetic oligonucleotide
ggttcgcgggagcggggttcgtgtcgctgtgctta

SEQ ID NO: 1912 - DNA, 22 bp, Artificial Sequence
  Description of Artificial Sequence: Synthetic probe
ccttgtctcggttcgcgggagc

SEQ ID NO: 1913 - DNA, 19 bp, Artificial Sequence
  Description of Artificial Sequence: Synthetic primer
ttttcggcggcagctaaac

SEQ ID NO: 1914 - DNA, 19 bp, Artificial Sequence
  Description of Artificial Sequence: Synthetic primer
taagcacagcgacacgaac

SEQ ID NO: 1915 - DNA, 47 bp, Artificial Sequence
  Description of Artificial Sequence: Synthetic primer
  Description of Combined DNA/RNA Molecule: Synthetic primer
taagcacagcgacacgaactaaacgcctctactccgaaattgaaact

SEQ ID NO: 1916 - DNA, 29 bp, Artificial Sequence
  Description of Artificial Sequence: Synthetic primer
  Description of Combined DNA/RNA Molecule: Synthetic primer
gttgaggtaggtttcgtagatttcgagtc

SEQ ID NO: 1917 - DNA, 41 bp, Artificial Sequence
  Description of Artificial Sequence: Synthetic primer
  Description of Combined DNA/RNA Molecule: Synthetic primer
ggtgtcgtggttttcatatcactaacaacgtaacgautact

SEQ ID NO: 1918 - DNA, 50 bp, Artificial Sequence
  Description of Artificial Sequence: Synthetic oligonucleotide
  Description of Combined DNA/RNA Molecule: Synthetic oligonucleotide
tccggaccttcatcctccattcgagttagagtgggatttaacagcggtta

SEQ ID NO: 1919 - DNA, 50 bp, Artificial Sequence
  Description of Artificial Sequence: Synthetic oligonucleotide
ggtcggtgcgttgtgtttggttaatttcggtgggcaggaacacgatagta

SEQ ID NO: 1920 - DNA, 25 bp, Artificial Sequence
  Description of Artificial Sequence: Synthetic probe
aataacagcggtcggtgcgttgtgt

SEQ ID NO: 1921 - DNA, 19 bp, Artificial Sequence
  Description of Artificial Sequence: Synthetic primer
tccggaccttcatcctcca

SEQ ID NO: 1922 - DNA, 20 bp, Artificial Sequence
  Description of Artificial Sequence: Synthetic primer
tactatcgtgttcctgccca

SEQ ID NO: 1923 - DNA, 57 bp, Artificial Sequence
  Description of Artificial Sequence: Synthetic primer
  Description of Combined DNA/RNA Molecule: Synthetic primer
tactatcgtgttcctgcccattttcatatcactaacaacgtaacgattactgaaatc

SEQ ID NO: 1924 - DNA, 28 bp, Artificial Sequence
  Description of Artificial Sequence: Synthetic primer
  Description of Combined DNA/RNA Molecule: Synthetic primer
gttagggtagttcggtcgatttcgagaa

SEQ ID NO: 1925 - DNA, 30 bp, Artificial Sequence
  Description of Artificial Sequence: Synthetic primer
  Description of Combined DNA/RNA Molecule: Synthetic primer
ggtgtcgtggtctcccgcgcccaaacccca

SEQ ID NO: 1926 - DNA, 49 bp, Artificial Sequence
  Description of Artificial Sequence: Synthetic oligonucleotide
  Description of Combined DNA/RNA Molecule: Synthetic oligonucleotide
ttagccgccaaacgtaccagttcggtcgatttcgagaggttctcgcgcc

SEQ ID NO: 1927 - DNA, 54 bp, Artificial Sequence
  Description of Artificial Sequence: Synthetic oligonucleotide
gcgtttttttttcgttttgtttaggagtggagtgtgggcaggaacacgatagta

SEQ ID NO: 1928 - DNA, 36 bp, Artificial Sequence
  Description of Artificial Sequence: Synthetic probe
ttggttctcgcgtttttttttcgttttgtttaggag

SEQ ID NO: 1929 - DNA, 19 bp, Artificial Sequence
  Description of Artificial Sequence: Synthetic primer
ttagccgccaaacgtacca

SEQ ID NO: 1930 - DNA, 20 bp, Artificial Sequence
  Description of Artificial Sequence: Synthetic primer
tactatcgtgttcctgccca

SEQ ID NO: 1931 - DNA, 40 bp, Artificial Sequence
  Description of Artificial Sequence: Synthetic primer
  Description of Combined DNA/RNA Molecule: Synthetic primer
tactatcgtgttcctgcccacgcgcccaaaccctgacact

SEQ ID NO: 1932 - DNA, 25 bp, Artificial Sequence
  Description of Artificial Sequence: Synthetic primer
  Description of Combined DNA/RNA Molecule: Synthetic primer
cgtagttttcgagaggtttcggttg

SEQ ID NO: 1933 - DNA, 35 bp, Artificial Sequence
  Description of Artificial Sequence: Synthetic primer
  Description of Combined DNA/RNA Molecule: Synthetic primer
ggtgtcgtggaatactctctaccttcgcccccaag

SEQ ID NO: 1934 - DNA, 52 bp, Artificial Sequence
  Description of Artificial Sequence: Synthetic oligonucleotide
  Description of Combined DNA/RNA Molecule: Synthetic oligonucleotide
tagcagctgaacaacccaacgggtttcggttagggcgttttttacacgttta

SEQ ID NO: 1935 - DNA, 56 bp, Artificial Sequence
  Description of Artificial Sequence: Synthetic oligonucleotide
gttcggttatttgtaggagttcgttattgtaagtcggttgtatggtcggcatgcta

SEQ ID NO: 1936 - DNA, 38 bp, Artificial Sequence
  Description of Artificial Sequence: Synthetic probe
aatttacacgttcggttatttgtaggagttcgttattg

SEQ ID NO: 1937 - DNA, 20 bp, Artificial Sequence
  Description of Artificial Sequence: Synthetic primer
tagcagctgaacaacccaac

SEQ ID NO: 1938 - DNA, 20 bp, Artificial Sequence
  Description of Artificial Sequence: Synthetic primer
tagcatgccgaccatacaac

SEQ ID NO: 1939 - DNA, 48 bp, Artificial Sequence
  Description of Artificial Sequence: Synthetic primer
  Description of Combined DNA/RNA Molecule: Synthetic primer
tagcatgccgaccatacaacgcccccaaacttctactaacctgacttg

SEQ ID NO: 1940 - DNA, 31 bp, Artificial Sequence
  Description of Artificial Sequence: Synthetic primer
  Description of Combined DNA/RNA Molecule: Synthetic primer
gttcgcgtttttttatcgtttttttcgattc

SEQ ID NO: 1941 - DNA, 32 bp, Artificial Sequence
  Description of Artificial Sequence: Synthetic primer
  Description of Combined DNA/RNA Molecule: Synthetic primer
ggtgtcgtggcgcctccctctaccaccgatat

SEQ ID NO: 1942 - DNA, 55 bp, Artificial Sequence
  Description of Artificial Sequence: Synthetic oligonucleotide
  Description of Combined DNA/RNA Molecule: Synthetic oligonucleotide
tctgcccttcgcttcgaactcgtttttttcgatttttttaagttttgagcggagc

SEQ ID NO: 1943 - DNA, 66 bp, Artificial Sequence
  Description of Artificial Sequence: Synthetic oligonucleotide
ggaatttgattttgttttatcggttttaggtattttaggatttgaggttgtatggtcggcatgcta

SEQ ID NO: 1944 - DNA, 47 bp, Artificial Sequence
  Description of Artificial Sequence: Synthetic probe
aatttgagcggaatttgattttgttttatcggttttaggtattttag

SEQ ID NO: 1945 - DNA, 19 bp, Artificial Sequence
  Description of Artificial Sequence: Synthetic primer
tctgcccttcgcttcgaac

SEQ ID NO: 1946 - DNA, 20 bp, Artificial Sequence
  Description of Artificial Sequence: Synthetic primer
tagcatgccgaccatacaac

SEQ ID NO: 1947 - DNA, 43 bp, Artificial Sequence
  Description of Artificial Sequence: Synthetic primer
  Description of Combined DNA/RNA Molecule: Synthetic primer
tagcatgccgaccatacaaccgcctccctctaccactgatact

SEQ ID NO: 1948 - DNA, 23 bp, Artificial Sequence
  Description of Artificial Sequence: Synthetic primer
  Description of Combined DNA/RNA Molecule: Synthetic primer
tgttatagtggcggtggcggcga

SEQ ID NO: 1949 - DNA, 30 bp, Artificial Sequence
  Description of Artificial Sequence: Synthetic primer
  Description of Combined DNA/RNA Molecule: Synthetic primer
ggtgtcgtggctccgacccgcgtaaccccg

SEQ ID NO: 1950 - DNA, 45 bp, Artificial Sequence
  Description of Artificial Sequence: Synthetic oligonucleotide
  Description of Combined DNA/RNA Molecule: Synthetic oligonucleotide
ttgcaaaccacccggacaagcggcggttgttgttgagctcgggta

SEQ ID NO: 1951 - DNA, 36 bp, Artificial Sequence
  Description of Artificial Sequence: Synthetic oligonucleotide
gggcggcggcggagatttggtcagcatcgactccta

SEQ ID NO: 1952 - DNA, 18 bp, Artificial Sequence
  Description of Artificial Sequence: Synthetic probe
aatgagctcgggcggcgg

SEQ ID NO: 1953 - DNA, 19 bp, Artificial Sequence
  Description of Artificial Sequence: Synthetic primer
ttgcaaaccacccggacaa

SEQ ID NO: 1954 - DNA, 20 bp, Artificial Sequence
  Description of Artificial Sequence: Synthetic primer
taggagtcgatgctgaccaa

SEQ ID NO: 1955 - DNA, 44 bp, Artificial Sequence
  Description of Artificial Sequence: Synthetic primer
  Description of Combined DNA/RNA Molecule: Synthetic primer
taggagtcgatgctgaccaaccccaacccgaaatccctgccgct

SEQ ID NO: 1956 - DNA, 27 bp, Artificial Sequence
  Description of Artificial Sequence: Synthetic primer
  Description of Combined DNA/RNA Molecule: Synthetic primer
gttcgttttggaggaatagtacggtca

SEQ ID NO: 1957 - DNA, 45 bp, Artificial Sequence
  Description of Artificial Sequence: Synthetic primer
  Description of Combined DNA/RNA Molecule: Synthetic primer
ggtgtcgtggtataaacaaccgacaaataataaaactaaaaacct

SEQ ID NO: 1958 - DNA, 52 bp, Artificial Sequence
  Description of Artificial Sequence: Synthetic oligonucleotide
  Description of Combined DNA/RNA Molecule: Synthetic oligonucleotide
ttgcaaaccacccggacaaggagaatagtacggtcgtttttattatcgtcac

SEQ ID NO: 1959 - DNA, 58 bp, Artificial Sequence
  Description of Artificial Sequence: Synthetic oligonucleotide
gtcgttttttcgtcgtttaaatgcgttttgattaagacttggtcagcatcgactccta

SEQ ID NO: 1960 - DNA, 38 bp, Artificial Sequence
  Description of Artificial Sequence: Synthetic probe
aatattatcgtcgttttttcgtcgtttaaatgcgtttt

SEQ ID NO: 1961 - DNA, 19 bp, Artificial Sequence
  Description of Artificial Sequence: Synthetic primer
ttgcaaaccacccggacaa

SEQ ID NO: 1962 - DNA, 20 bp, Artificial Sequence
  Description of Artificial Sequence: Synthetic primer
taggagtcgatgctgaccaa

SEQ ID NO: 1963 - DNA, 58 bp, Artificial Sequence
  Description of Artificial Sequence: Synthetic primer
  Description of Combined DNA/RNA Molecule: Synthetic primer
taggagtcgatgctgaccaaaaacaaccgacaaataataaaactaaaaacctgucttg

SEQ ID NO: 1964 - DNA, 30 bp, Artificial Sequence
  Description of Artificial Sequence: Synthetic primer
  Description of Combined DNA/RNA Molecule: Synthetic primer
gtagaaagattaagcgcggtatttcgtgac

SEQ ID NO: 1965 - DNA, 38 bp, Artificial Sequence
  Description of Artificial Sequence: Synthetic primer
  Description of Combined DNA/RNA Molecule: Synthetic primer
ggtgtcgtggcgcttactctataattttcccgcaccag

SEQ ID NO: 1966 - DNA, 59 bp, Artificial Sequence
  Description of Artificial Sequence: Synthetic oligonucleotide
  Description of Combined DNA/RNA Molecule: Synthetic oligonucleotide
taagacgtatgctagcgccaacggtatttcgtgataggatgggatagatttctcgggcc

SEQ ID NO: 1967 - DNA, 49 bp, Artificial Sequence
  Description of Artificial Sequence: Synthetic oligonucleotide
gggtttcgaggttttaggatggcgtagggttggtcagcatcgactccta

SEQ ID NO: 1968 - DNA, 32 bp, Artificial Sequence
  Description of Artificial Sequence: Synthetic probe
ttatttctcgggtttcgaggttttaggatggc

SEQ ID NO: 1969 - DNA, 21 bp, Artificial Sequence
  Description of Artificial Sequence: Synthetic primer
taagacgtatgctagcgccaa

SEQ ID NO: 1970 - DNA, 20 bp, Artificial Sequence
  Description of Artificial Sequence: Synthetic primer
taggagtcgatgctgaccaa

SEQ ID NO: 1971 - DNA, 49 bp, Artificial Sequence
  Description of Artificial Sequence: Synthetic primer
  Description of Combined DNA/RNA Molecule: Synthetic primer
taggagtcgatgctgaccaactataattttcccgcaccaacctgctact

SEQ ID NO: 1972 - DNA, 24 bp, Artificial Sequence
  Description of Artificial Sequence: Synthetic primer
  Description of Combined DNA/RNA Molecule: Synthetic primer
ggtttttttcgtcggcgtcgagtc

SEQ ID NO: 1973 - DNA, 32 bp, Artificial Sequence
  Description of Artificial Sequence: Synthetic primer
  Description of Combined DNA/RNA Molecule: Synthetic primer
ggtgtcgtggcgcattaacgccaacgcuaaag

SEQ ID NO: 1974 - DNA, 48 bp, Artificial Sequence
  Description of Artificial Sequence: Synthetic oligonucleotide
  Description of Combined DNA/RNA Molecule: Synthetic oligonucleotide
tacatgccatcccacgacacgtcggcgtcgagttgtagttctcgttcc

SEQ ID NO: 1975 - DNA, 58 bp, Artificial Sequence
  Description of Artificial Sequence: Synthetic oligonucleotide
gtttttcgttaacgtttcggacgtttattttagcgtttgtgtgtcggagcggttacta

SEQ ID NO: 1976 - DNA, 41 bp, Artificial Sequence
  Description of Artificial Sequence: Synthetic probe
aaagttctcgtttttcgttaacgtttcggacgtttatttta

SEQ ID NO: 1977 - DNA, 19 bp, Artificial Sequence
  Description of Artificial Sequence: Synthetic primer
tacatgccatcccacgaca

SEQ ID NO: 1978 - DNA, 19 bp, Artificial Sequence
  Description of Artificial Sequence: Synthetic primer
tagtaaccgctccgacaca

SEQ ID NO: 1979 - DNA, 50 bp, Artificial Sequence
  Description of Artificial Sequence: Synthetic primer
  Description of Combined DNA/RNA Molecule: Synthetic primer
tagtaaccgctccgacacacattaacgccaacgctaaaacaaatgctaag

SEQ ID NO: 1980 - DNA, 21 bp, Artificial Sequence
  Description of Artificial Sequence: Synthetic primer
  Description of Combined DNA/RNA Molecule: Synthetic primer
tggagattgaggtcgcgagga

SEQ ID NO: 1981 - DNA, 32 bp, Artificial Sequence
  Description of Artificial Sequence: Synthetic primer
  Description of Combined DNA/RNA Molecule: Synthetic primer
ggtgtcgtggcaaaaccccgcccaaccgcacg

SEQ ID NO: 1982 - DNA, 52 bp, Artificial Sequence
  Description of Artificial Sequence: Synthetic oligonucleotide
  Description of Combined DNA/RNA Molecule: Synthetic oligonucleotide
tccaaacaagctgatccgtacaattggagtcgcgagggtatattctcgagaa

SEQ ID NO: 1983 - DNA, 47 bp, Artificial Sequence
  Description of Artificial Sequence: Synthetic oligonucleotide
gaggagtacggagttagggttaggtaggtgtgtcggagcggttacta

SEQ ID NO: 1984 - DNA, 32 bp, Artificial Sequence
  Description of Artificial Sequence: Synthetic probe
cctattctcgaggagtacggagttagggttag

SEQ ID NO: 1985 - DNA, 22 bp, Artificial Sequence
  Description of Artificial Sequence: Synthetic primer
tccaaacaagctgatccgtaca

SEQ ID NO: 1986 - DNA, 19 bp, Artificial Sequence
  Description of Artificial Sequence: Synthetic primer
tagtaaccgctccgacaca

SEQ ID NO: 1987 - DNA, 42 bp, Artificial Sequence
  Description of Artificial Sequence: Synthetic primer
  Description of Combined DNA/RNA Molecule: Synthetic primer
tagtaaccgctccgacacacaaaaccccgcccaactgcacag

SEQ ID NO: 1988 - DNA, 21 bp, Artificial Sequence
  Description of Artificial Sequence: Synthetic primer
  Description of Combined DNA/RNA Molecule: Synthetic primer
ggatcgaggtcgcgtcgtttc

SEQ ID NO: 1989 - DNA, 34 bp, Artificial Sequence
  Description of Artificial Sequence: Synthetic primer
  Description of Combined DNA/RNA Molecule: Synthetic primer
ggtgtcgtggaaactaacgacccgcctaaaaaag

SEQ ID NO: 1990 - DNA, 66 bp, Artificial Sequence
  Description of Artificial Sequence: Synthetic oligonucleotide
  Description of Combined DNA/RNA Molecule: Synthetic oligonucleotide
tagggcgacagttaccacaagtttttgggtttattatttttagattcggattttcgatctcggaac

SEQ ID NO: 1991 - DNA, 51 bp, Artificial Sequence
  Description of Artificial Sequence: Synthetic oligonucleotide
ggagttacggtttaggacgcgaaaagattttttgtgggtctcgctcgtata

SEQ ID NO: 1992 - DNA, 30 bp, Artificial Sequence
  Description of Artificial Sequence: Synthetic probe
aacgatctcggagttacggtttaggacgcg

SEQ ID NO: 1993 - DNA, 20 bp, Artificial Sequence
  Description of Artificial Sequence: Synthetic primer
tagggcgacagttaccacaa

SEQ ID NO: 1994 - DNA, 20 bp, Artificial Sequence
  Description of Artificial Sequence: Synthetic primer
tatacgagcgagacccacaa

SEQ ID NO: 1995 - DNA, 52 bp, Artificial Sequence
  Description of Artificial Sequence: Synthetic primer
  Description of Combined DNA/RNA Molecule: Synthetic primer
tatacgagcgagacccacaaaactaacgacccgcctaaaaaaaaatguaatg

SEQ ID NO: 1996 - DNA, 29 bp, Artificial Sequence
  Description of Artificial Sequence: Synthetic primer
  Description of Combined DNA/RNA Molecule: Synthetic primer
gaattgttagagaacgtggttttcgcgga

SEQ ID NO: 1997 - DNA, 32 bp, Artificial Sequence
  Description of Artificial Sequence: Synthetic primer
  Description of Combined DNA/RNA Molecule: Synthetic primer
ggtgtcgtggccctacccgacgactcacaaag

SEQ ID NO: 1998 - DNA, 43 bp, Artificial Sequence
  Description of Artificial Sequence: Synthetic oligonucleotide
  Description of Combined DNA/RNA Molecule: Synthetic oligonucleotide
tccgactttagtgcgtcacaagtggttttcgcgggagcgttta

SEQ ID NO: 1999 - DNA, 50 bp, Artificial Sequence
  Description of Artificial Sequence: Synthetic oligonucleotide
gttcggagtcgtcgtataggtagcgagagcttgtgggtctcgctcgtata

SEQ ID NO: 2000 - DNA, 28 bp, Artificial Sequence
  Description of Artificial Sequence: Synthetic probe
ttcgggagcgttcggagtcgtcgtatag

SEQ ID NO: 2001 - DNA, 21 bp, Artificial Sequence
  Description of Artificial Sequence: Synthetic primer
tccgactttagtgcgtcacaa

SEQ ID NO: 2002 - DNA, 20 bp, Artificial Sequence
  Description of Artificial Sequence: Synthetic primer
tatacgagcgagacccacaa

SEQ ID NO: 2003 - DNA, 43 bp, Artificial Sequence
  Description of Artificial Sequence: Synthetic primer
  Description of Combined DNA/RNA Molecule: Synthetic primer
tatacgagcgagacccacaaaaaaacgccgcgctcttgctact

SEQ ID NO: 2004 - DNA, 21 bp, Artificial Sequence
  Description of Artificial Sequence: Synthetic primer
  Description of Combined DNA/RNA Molecule: Synthetic primer
ggttggcgagtagggcgagtg

SEQ ID NO: 2005 - DNA, 31 bp, Artificial Sequence
  Description of Artificial Sequence: Synthetic primer
  Description of Combined DNA/RNA Molecule: Synthetic primer
ggtgtcgtgggccccgacaacaacgauaaca

SEQ ID NO: 2006 - DNA, 46 bp, Artificial Sequence
  Description of Artificial Sequence: Synthetic oligonucleotide
  Description of Combined DNA/RNA Molecule: Synthetic oligonucleotide
tcaaacaaaggcgaccacaacgcgagtagggcgagtagcgcgttcc

SEQ ID NO: 2007 - DNA, 58 bp, Artificial Sequence
  Description of Artificial Sequence: Synthetic oligonucleotide
gtttttcggtcgtattttgagttataggcgtcgtcggttgtcgcataggcagttcata

SEQ ID NO: 2008 - DNA, 37 bp, Artificial Sequence
  Description of Artificial Sequence: Synthetic probe
ttgtagcgcgtttttcggtcgtattttgagttatagg

SEQ ID NO: 2009 - DNA, 21 bp, Artificial Sequence
  Description of Artificial Sequence: Synthetic primer
tcaaacaaaggcgaccacaac

SEQ ID NO: 2010 - DNA, 22 bp, Artificial Sequence
  Description of Artificial Sequence: Synthetic primer
tatgaactgcctatgcgacaac

SEQ ID NO: 2011 - DNA, 50 bp, Artificial Sequence
  Description of Artificial Sequence: Synthetic primer
  Description of Combined DNA/RNA Molecule: Synthetic primer
tatgaactgcctatgcgacaaccgacaacaacgataacgacgatgcctac

SEQ ID NO: 2012 - DNA, 31 bp, Artificial Sequence
  Description of Artificial Sequence: Synthetic primer
  Description of Combined DNA/RNA Molecule: Synthetic primer
gaatttcgtttttataaacgtttcgcgatgg

SEQ ID NO: 2013 - DNA, 35 bp, Artificial Sequence
  Description of Artificial Sequence: Synthetic primer
  Description of Combined DNA/RNA Molecule: Synthetic primer
ggtgtcgtggtttctctctaattcgctcgcuccca

SEQ ID NO: 2014 - DNA, 46 bp, Artificial Sequence
  Description of Artificial Sequence: Synthetic oligonucleotide
  Description of Combined DNA/RNA Molecule: Synthetic oligonucleotide
taaacaatgagacccgctgaacgttggagggtaggcggatcggaaa

SEQ ID NO: 2015 - DNA, 49 bp, Artificial Sequence
  Description of Artificial Sequence: Synthetic oligonucleotide
ggaggcgggaggtttatagagggagaggttgtcgcataggcagttcata

SEQ ID NO: 2016 - DNA, 21 bp, Artificial Sequence
  Description of Artificial Sequence: Synthetic probe
ttgcggatcggaggcgggagg

SEQ ID NO: 2017 - DNA, 22 bp, Artificial Sequence
  Description of Artificial Sequence: Synthetic primer
taaacaatgagacccgctgaac

SEQ ID NO: 2018 - DNA, 22 bp, Artificial Sequence
  Description of Artificial Sequence: Synthetic primer
tatgaactgcctatgcgacaac

SEQ ID NO: 2019 - DNA, 49 bp, Artificial Sequence
  Description of Artificial Sequence: Synthetic primer
  Description of Combined DNA/RNA Molecule: Synthetic primer
tatgaactgcctatgcgacaacctctctaattcgctcgctcctgccctt

SEQ ID NO: 2020 - DNA, 29 bp, Artificial Sequence
  Description of Artificial Sequence: Synthetic primer
  Description of Combined DNA/RNA Molecule: Synthetic primer
cggtgttacggatcgatatagttcgtttc

SEQ ID NO: 2021 - DNA, 31 bp, Artificial Sequence
  Description of Artificial Sequence: Synthetic primer
  Description of Combined DNA/RNA Molecule: Synthetic primer
ggtgtcgtggtcccgcgtacgactcauaccc

SEQ ID NO: 2022 - DNA, 54 bp, Artificial Sequence
  Description of Artificial Sequence: Synthetic oligonucleotide
  Description of Combined DNA/RNA Molecule: Synthetic oligonucleotide
tctgccagaacaccgacacgttcgttttagtatttgacgttcggatctcgcgcc

SEQ ID NO: 2023 - DNA, 61 bp, Artificial Sequence
  Description of Artificial Sequence: Synthetic oligonucleotide
gcgtttttagtcggattttagagtttttttattcgttaatcggtgtgttggcgtacggtga

SEQ ID NO: 2024 - DNA, 36 bp, Artificial Sequence
  Description of Artificial Sequence: Synthetic probe
aaggatctcgcgtttttagtcggattttagagtttt

SEQ ID NO: 2025 - DNA, 19 bp, Artificial Sequence
  Description of Artificial Sequence: Synthetic primer
tctgccagaacaccgacac

SEQ ID NO: 2026 - DNA, 19 bp, Artificial Sequence
  Description of Artificial Sequence: Synthetic primer
tcaccgtacgccaacacac

SEQ ID NO: 2027 - DNA, 56 bp, Artificial Sequence
  Description of Artificial Sequence: Synthetic primer
  Description of Combined DNA/RNA Molecule: Synthetic primer
tcaccgtacgccaacacactacgactcataccttacaataaacgattaatgaatag

SEQ ID NO: 2028 - DNA, 20 bp, Artificial Sequence
  Description of Artificial Sequence: Synthetic primer
  Description of Combined DNA/RNA Molecule: Synthetic primer
tttgagcgcggtcgcgggac

SEQ ID NO: 2029 - DNA, 32 bp, Artificial Sequence
  Description of Artificial Sequence: Synthetic primer
  Description of Combined DNA/RNA Molecule: Synthetic primer
ggtgtcgtggcgaaaaccgcctctcgcccgca

SEQ ID NO: 2030 - DNA, 44 bp, Artificial Sequence
  Description of Artificial Sequence: Synthetic oligonucleotide
  Description of Combined DNA/RNA Molecule: Synthetic oligonucleotide
tccggatcaaagcagccacgcgggataagggatgttagcgggta

SEQ ID NO: 2031 - DNA, 36 bp, Artificial Sequence
  Description of Artificial Sequence: Synthetic oligonucleotide
gggcggtaggagcgagcgtgtgttggcgtacggtga

SEQ ID NO: 2032 - DNA, 22 bp, Artificial Sequence
  Description of Artificial Sequence: Synthetic probe
tttgttagcgggcggtaggagc

SEQ ID NO: 2033 - DNA, 19 bp, Artificial Sequence
  Description of Artificial Sequence: Synthetic primer
tccggatcaaagcagccac

SEQ ID NO: 2034 - DNA, 19 bp, Artificial Sequence
  Description of Artificial Sequence: Synthetic primer
tcaccgtacgccaacacac

SEQ ID NO: 2035 - DNA, 40 bp, Artificial Sequence
  Description of Artificial Sequence: Synthetic primer
  Description of Combined DNA/RNA Molecule: Synthetic primer
tcaccgtacgccaacacaccctctcgcccgcgatgctcgt

SEQ ID NO: 2036 - DNA, 22 bp, Artificial Sequence
  Description of Artificial Sequence: Synthetic primer
  Description of Combined DNA/RNA Molecule: Synthetic primer
cggagaaggcgggttacgggca

SEQ ID NO: 2037 - DNA, 35 bp, Artificial Sequence
  Description of Artificial Sequence: Synthetic primer
  Description of Combined DNA/RNA Molecule: Synthetic primer
ggtgtcgtgggaactacccgcaaaacgatcaaatg

SEQ ID NO: 2038 - DNA, 51 bp, Artificial Sequence
  Description of Artificial Sequence: Synthetic oligonucleotide
  Description of Combined DNA/RNA Molecule: Synthetic oligonucleotide
ttctagataccacggacgcacgttacgggcgataagatggagaatcggtct

SEQ ID NO: 2039 - DNA, 47 bp, Artificial Sequence
  Description of Artificial Sequence: Synthetic oligonucleotide
ggttcgagagggatagaggtcgcgttggtgttggtgtgcaaagctga

SEQ ID NO: 2040 - DNA, 31 bp, Artificial Sequence
  Description of Artificial Sequence: Synthetic probe
aagagaatcggttcgagagggatagaggtcg

SEQ ID NO: 2041 - DNA, 21 bp, Artificial Sequence
  Description of Artificial Sequence: Synthetic primer
ttctagataccacggacgcac

SEQ ID NO: 2042 - DNA, 20 bp, Artificial Sequence
  Description of Artificial Sequence: Synthetic primer
tcagctttgcacaccaacac

SEQ ID NO: 2043 - DNA, 49 bp, Artificial Sequence
  Description of Artificial Sequence: Synthetic primer
  Description of Combined DNA/RNA Molecule: Synthetic primer
tcagctttgcacaccaacaccgatcaaataaaccccccaacttgctact

SEQ ID NO: 2044 - DNA, 32 bp, Artificial Sequence
  Description of Artificial Sequence: Synthetic primer
  Description of Combined DNA/RNA Molecule: Synthetic primer
gtattcgagtttcgtcgttattttttcgttca

SEQ ID NO: 2045 - DNA, 33 bp, Artificial Sequence
  Description of Artificial Sequence: Synthetic primer
  Description of Combined DNA/RNA Molecule: Synthetic primer
ggtgtcgtggctcctaacgcgaacgaccaacgg

SEQ ID NO: 2046 - DNA, 52 bp, Artificial Sequence
  Description of Artificial Sequence: Synthetic oligonucleotide
  Description of Combined DNA/RNA Molecule: Synthetic oligonucleotide
tatgcggaccgatgactcaatattttttcgttcggcgcgtttttatcgtacc

SEQ ID NO: 2047 - DNA, 62 bp, Artificial Sequence
  Description of Artificial Sequence: Synthetic oligonucleotide
gtattatttgggcgtttcggttattattattaacgggaggttgcttggcttgatctacctga

SEQ ID NO: 2048 - DNA, 44 bp, Artificial Sequence
  Description of Artificial Sequence: Synthetic probe
aattttatcgtattatttgggcgtttcggttattattattaacg

SEQ ID NO: 2049 - DNA, 20 bp, Artificial Sequence
  Description of Artificial Sequence: Synthetic primer
tatgcggaccgatgactcaa

SEQ ID NO: 2050 - DNA, 22 bp, Artificial Sequence
  Description of Artificial Sequence: Synthetic primer
tcaggtagatcaagccaagcaa

SEQ ID NO: 2051 - DNA, 49 bp, Artificial Sequence
  Description of Artificial Sequence: Synthetic primer
  Description of Combined DNA/RNA Molecule: Synthetic primer
tcaggtagatcaagccaagcaactcctaacgcgaacgaccaatgcgttg

SEQ ID NO: 2052 - DNA, 23 bp, Artificial Sequence
  Description of Artificial Sequence: Synthetic primer
  Description of Combined DNA/RNA Molecule: Synthetic primer
gtgagcgcggacgtattcggtaa

SEQ ID NO: 2053 - DNA, 35 bp, Artificial Sequence
  Description of Artificial Sequence: Synthetic primer
  Description of Combined DNA/RNA Molecule: Synthetic primer
ggtgtcgtgggaaaaactaccgcgcgtaaaactag

SEQ ID NO: 2054 - DNA, 44 bp, Artificial Sequence
  Description of Artificial Sequence: Synthetic oligonucleotide
  Description of Combined DNA/RNA Molecule: Synthetic oligonucleotide
ttcgtgggcacacaagcaacggtagggatgtgagtgagcggaaa

SEQ ID NO: 2055 - DNA, 57 bp, Artificial Sequence
  Description of Artificial Sequence: Synthetic oligonucleotide
ggagggaagagggtcgtaaattaatttaggattcgttgcttggcttgatctacctga

SEQ ID NO: 2056 - DNA, 38 bp, Artificial Sequence
  Description of Artificial Sequence: Synthetic probe
aaagtgagcggagggaagagggtcgtaaattaatttag

SEQ ID NO: 2057 - DNA, 19 bp, Artificial Sequence
  Description of Artificial Sequence: Synthetic primer
ttcgtgggcacacaagcaa

SEQ ID NO: 2058 - DNA, 22 bp, Artificial Sequence
  Description of Artificial Sequence: Synthetic primer
tcaggtagatcaagccaagcaa

SEQ ID NO: 2059 - DNA, 52 bp, Artificial Sequence
  Description of Artificial Sequence: Synthetic primer
  Description of Combined DNA/RNA Molecule: Synthetic primer
tcaggtagatcaagccaagcaaaaactaccgcgcgtaaaactaaatgaatct

SEQ ID NO: 2060 - DNA, 26 bp, Artificial Sequence
  Description of Artificial Sequence: Synthetic primer
  Description of Combined DNA/RNA Molecule: Synthetic primer
cgttaggtttggagaggagtcgtttc

SEQ ID NO: 2061 - DNA, 36 bp, Artificial Sequence
  Description of Artificial Sequence: Synthetic primer
  Description of Combined DNA/RNA Molecule: Synthetic primer
ggtgtcgtggataaacgtatcctccgctacaataat

SEQ ID NO: 2062 - DNA, 54 bp, Artificial Sequence
  Description of Artificial Sequence: Synthetic oligonucleotide
  Description of Combined DNA/RNA Molecule: Synthetic oligonucleotide
ttgaaggaggaaatcggcacagagaggagtcgtttttggtaaagttggcgttcc

SEQ ID NO: 2063 - DNA, 67 bp, Artificial Sequence
  Description of Artificial Sequence: Synthetic oligonucleotide
gttttatttttgaacgtcgttttcgtttcggattatattttttagtgtcgaaccgttttaggactga

SEQ ID NO: 2064 - DNA, 38 bp, Artificial Sequence
  Description of Artificial Sequence: Synthetic probe
ttagttggcgttttatttttgaacgtcgttttcgtttc

SEQ ID NO: 2065 - DNA, 21 bp, Artificial Sequence
  Description of Artificial Sequence: Synthetic primer
ttgaaggaggaaatcggcaca

SEQ ID NO: 2066 - DNA, 22 bp, Artificial Sequence
  Description of Artificial Sequence: Synthetic primer
tcagtcctaaaacggttcgaca

SEQ ID NO: 2067 - DNA, 59 bp, Artificial Sequence
  Description of Artificial Sequence: Synthetic primer
  Description of Combined DNA/RNA Molecule: Synthetic primer
tcagtcctaaaacggttcgacaccgctacaataacccctaaaaaatataatctgaaaca

SEQ ID NO: 2068 - DNA, 26 bp, Artificial Sequence
  Description of Artificial Sequence: Synthetic primer
  Description of Combined DNA/RNA Molecule: Synthetic primer
ggtgatgttttgtacgaaggcggcga

SEQ ID NO: 2069 - DNA, 36 bp, Artificial Sequence
  Description of Artificial Sequence: Synthetic primer
  Description of Combined DNA/RNA Molecule: Synthetic primer
ggtgtcgtggttaccgtacttacctaacgccutctc

SEQ ID NO: 2070 - DNA, 39 bp, Artificial Sequence
  Description of Artificial Sequence: Synthetic oligonucleotide
  Description of Combined DNA/RNA Molecule: Synthetic oligonucleotide
ttcggcaggctacggtacagaaggcggcggtagcgtcag

SEQ ID NO: 2071 - DNA, 47 bp, Artificial Sequence
  Description of Artificial Sequence: Synthetic oligonucleotide
gtcgaggatgcgttggagtttagggtgtcgaaccgttttaggactga

SEQ ID NO: 2072 - DNA, 25 bp, Artificial Sequence
  Description of Artificial Sequence: Synthetic probe
ttcggtagcgtcgaggatgcgttgg

SEQ ID NO: 2073 - DNA, 19 bp, Artificial Sequence
  Description of Artificial Sequence: Synthetic primer
ttcggcaggctacggtaca

SEQ ID NO: 2074 - DNA, 22 bp, Artificial Sequence
  Description of Artificial Sequence: Synthetic primer
tcagtcctaaaacggttcgaca

SEQ ID NO: 2075 - DNA, 48 bp, Artificial Sequence
  Description of Artificial Sequence: Synthetic primer
  Description of Combined DNA/RNA Molecule: Synthetic primer
tcagtcctaaaacggttcgacacctaacgccttcttacccctgctcct

SEQ ID NO: 2076 - DNA, 26 bp, Artificial Sequence
  Description of Artificial Sequence: Synthetic primer
  Description of Combined DNA/RNA Molecule: Synthetic primer
ggatttgttgtcgaggttagcgcgca

SEQ ID NO: 2077 - DNA, 34 bp, Artificial Sequence
  Description of Artificial Sequence: Synthetic primer
  Description of Combined DNA/RNA Molecule: Synthetic primer
ggtgtcgtggccttctcccaccttccgtaaaaat

SEQ ID NO: 2078 - DNA, 47 bp, Artificial Sequence
  Description of Artificial Sequence: Synthetic oligonucleotide
  Description of Combined DNA/RNA Molecule: Synthetic oligonucleotide
tctcgacgatgaaaagcaacagtcgaggttagcgcgcgtgtcgagca

SEQ ID NO: 2079 - DNA, 48 bp, Artificial Sequence
  Description of Artificial Sequence: Synthetic oligonucleotide
gagtgtgttaggcgtgtgcgtggtttttgtgtgggtactgtccgtgga

SEQ ID NO: 2080 - DNA, 27 bp, Artificial Sequence
  Description of Artificial Sequence: Synthetic probe
ttgcgtgtcgagtgtgttaggcgtgtg

SEQ ID NO: 2081 - DNA, 21 bp, Artificial Sequence
  Description of Artificial Sequence: Synthetic primer
tctcgacgatgaaaagcaaca

SEQ ID NO: 2082 - DNA, 19 bp, Artificial Sequence
  Description of Artificial Sequence: Synthetic primer
tccacggacagtacccaca

SEQ ID NO: 2083 - DNA, 54 bp, Artificial Sequence
  Description of Artificial Sequence: Synthetic primer
  Description of Combined DNA/RNA Molecule: Synthetic primer
tccacggacagtacccacacgtaaaaacaataacacaacaaaaaccatgcacat

SEQ ID NO: 2084 - DNA, 28 bp, Artificial Sequence
  Description of Artificial Sequence: Synthetic primer
  Description of Combined DNA/RNA Molecule: Synthetic primer
cgggtttgtaagaaattgttcgcgtaac

SEQ ID NO: 2085 - DNA, 34 bp, Artificial Sequence
  Description of Artificial Sequence: Synthetic primer
  Description of Combined DNA/RNA Molecule: Synthetic primer
ggtgtcgtggccaaaattcaaaccccgccccgat

SEQ ID NO: 2086 - DNA, 46 bp, Artificial Sequence
  Description of Artificial Sequence: Synthetic oligonucleotide
  Description of Combined DNA/RNA Molecule: Synthetic oligonucleotide
ttctaggcgacacgacaacagtaggtaaagaggcgggtcgcggtaa

SEQ ID NO: 2087 - DNA, 43 bp, Artificial Sequence
  Description of Artificial Sequence: Synthetic oligonucleotide
ggtggagaaaggttaggcgttgggtgtgggtactgtccgtgga

SEQ ID NO: 2088 - DNA, 25 bp, Artificial Sequence
  Description of Artificial Sequence: Synthetic probe
ccgggtcgcggtggagaaaggttag

SEQ ID NO: 2089 - DNA, 20 bp, Artificial Sequence
  Description of Artificial Sequence: Synthetic primer
ttctaggcgacacgacaaca

SEQ ID NO: 2090 - DNA, 19 bp, Artificial Sequence
  Description of Artificial Sequence: Synthetic primer
tccacggacagtacccaca

SEQ ID NO: 2091 - DNA, 50 bp, Artificial Sequence
  Description of Artificial Sequence: Synthetic primer
  Description of Combined DNA/RNA Molecule: Synthetic primer
tccacggacagtacccacaccctatactctcaatccctcccaatgcctag

SEQ ID NO: 2092 - DNA, 23 bp, Artificial Sequence
  Description of Artificial Sequence: Synthetic primer
  Description of Combined DNA/RNA Molecule: Synthetic primer
ggtgagcgcgttaggttcggtaa

SEQ ID NO: 2093 - DNA, 42 bp, Artificial Sequence
  Description of Artificial Sequence: Synthetic primer
  Description of Combined DNA/RNA Molecule: Synthetic primer
ggtgtcgtggctaaaaaattccgaaacgaaaaaaaaaaaaag

SEQ ID NO: 2094 - DNA, 48 bp, Artificial Sequence
  Description of Artificial Sequence: Synthetic oligonucleotide
  Description of Combined DNA/RNA Molecule: Synthetic oligonucleotide
tttcaggccctaaccaccacgcgttaggttcggtagtaagtgcgtaac

SEQ ID NO: 2095 - DNA, 52 bp, Artificial Sequence
  Description of Artificial Sequence: Synthetic oligonucleotide
gtagttcgttttcgtagtcgcggttttttcgggtgggattaagggcgatgga

SEQ ID NO: 2096 - DNA, 31 bp, Artificial Sequence
  Description of Artificial Sequence: Synthetic probe
tttaagtgcgtagttcgttttcgtagtcgcg

SEQ ID NO: 2097 - DNA, 20 bp, Artificial Sequence
  Description of Artificial Sequence: Synthetic primer
tttcaggccctaaccaccac

SEQ ID NO: 2098 - DNA, 20 bp, Artificial Sequence
  Description of Artificial Sequence: Synthetic primer
tccatcgcccttaatcccac

SEQ ID NO: 2099 - DNA, 59 bp, Artificial Sequence
  Description of Artificial Sequence: Synthetic primer
  Description of Combined DNA/RNA Molecule: Synthetic primer
tccatcgcccttaatcccaccgaaacgaaaaaaaaaaaaaatacgaaaaatctgaaaag

SEQ ID NO: 2100 - DNA, 35 bp, Artificial Sequence
  Description of Artificial Sequence: Synthetic primer
  Description of Combined DNA/RNA Molecule: Synthetic primer
cgtttaagcgtaatttttttattttaaatcgttaa

SEQ ID NO: 2101 - DNA, 36 bp, Artificial Sequence
  Description of Artificial Sequence: Synthetic primer
  Description of Combined DNA/RNA Molecule: Synthetic primer
ggtgtcgtggcccgaaaacgtaaaaacgttcucttg

SEQ ID NO: 2102 - DNA, 56 bp, Artificial Sequence
  Description of Artificial Sequence: Synthetic oligonucleotide
  Description of Combined DNA/RNA Molecule: Synthetic oligonucleotide
tatctcctaaaagaagccgcaccgttaggaattagtggttggatttattgcgttgc

SEQ ID NO: 2103 - DNA, 63 bp, Artificial Sequence
  Description of Artificial Sequence: Synthetic oligonucleotide
gttataaaagtataaattgtgattcgatgagttcgcgtattcggtgggattaagggcgatgga

SEQ ID NO: 2104 - DNA, 44 bp, Artificial Sequence
  Description of Artificial Sequence: Synthetic probe
ttttattgcgttataaaagtataaattgtgattcgatgagttcg

SEQ ID NO: 2105 - DNA, 22 bp, Artificial Sequence
  Description of Artificial Sequence: Synthetic primer
tatctcctaaaagaagccgcac

SEQ ID NO: 2106 - DNA, 20 bp, Artificial Sequence
  Description of Artificial Sequence: Synthetic primer
tccatcgcccttaatcccac

SEQ ID NO: 2107 - DNA, 56 bp, Artificial Sequence
  Description of Artificial Sequence: Synthetic primer
  Description of Combined DNA/RNA Molecule: Synthetic primer
tccatcgcccttaatcccaccgtaaaaacgttctcttattttccgaatatgagaat

SEQ ID NO: 2108 - DNA, 31 bp, Artificial Sequence
  Description of Artificial Sequence: Synthetic primer
  Description of Combined DNA/RNA Molecule: Synthetic primer
gggttttagtaggcgttttttagttcggttc

SEQ ID NO: 2109 - DNA, 30 bp, Artificial Sequence
  Description of Artificial Sequence: Synthetic primer
  Description of Combined DNA/RNA Molecule: Synthetic primer
ggtgtcgtggaaaccgctcgaccgcaaaag

SEQ ID NO: 2110 - DNA, 49 bp, Artificial Sequence
  Description of Artificial Sequence: Synthetic oligonucleotide
  Description of Combined DNA/RNA Molecule: Synthetic oligonucleotide
tcgctcttcagcctcctacacggtttggttggttttggcgtctcgggta

SEQ ID NO: 2111 - DNA, 37 bp, Artificial Sequence
  Description of Artificial Sequence: Synthetic oligonucleotide
gggcgcggagtcgcgtgttctgggaattattgccgga

SEQ ID NO: 2112 - DNA, 18 bp, Artificial Sequence
  Description of Artificial Sequence: Synthetic probe
aagcgtctcgggcgcggg

SEQ ID NO: 2113 - DNA, 20 bp, Artificial Sequence
  Description of Artificial Sequence: Synthetic primer
tcgctcttcagcctcctaca

SEQ ID NO: 2114 - DNA, 22 bp, Artificial Sequence
  Description of Artificial Sequence: Synthetic primer
tccggcaataattcccagaaca

SEQ ID NO: 2115 - DNA, 49 bp, Artificial Sequence
  Description of Artificial Sequence: Synthetic primer
  Description of Combined DNA/RNA Molecule: Synthetic primer
tccggcaataattcccagaacacgcaaaaaaaccgaaaaccgtgaccct

SEQ ID NO: 2116 - DNA, 26 bp, Artificial Sequence
  Description of Artificial Sequence: Synthetic primer
  Description of Combined DNA/RNA Molecule: Synthetic primer
gcgttatgaaggttagatcgcggtta

SEQ ID NO: 2117 - DNA, 31 bp, Artificial Sequence
  Description of Artificial Sequence: Synthetic primer
  Description of Combined DNA/RNA Molecule: Synthetic primer
ggtgtcgtggtacccgctaaacgcgccgctt

SEQ ID NO: 2118 - DNA, 46 bp, Artificial Sequence
  Description of Artificial Sequence: Synthetic oligonucleotide
  Description of Combined DNA/RNA Molecule: Synthetic oligonucleotide
ttcaacgatcgcgcagacaggttagatcgcggttgtgcatcgtcac

SEQ ID NO: 2119 - DNA, 48 bp, Artificial Sequence
  Description of Artificial Sequence: Synthetic oligonucleotide
gtcgtcgcggagtaggttaggcgtagtgttctgggaattattgccgga

SEQ ID NO: 2120 - DNA, 25 bp, Artificial Sequence
  Description of Artificial Sequence: Synthetic probe
aagtgcatcgtcgtcgcggagtagg

SEQ ID NO: 2121 - DNA, 19 bp, Artificial Sequence
  Description of Artificial Sequence: Synthetic primer
ttcaacgatcgcgcagaca

SEQ ID NO: 2122 - DNA, 22 bp, Artificial Sequence
  Description of Artificial Sequence: Synthetic primer
tccggcaataattcccagaaca

SEQ ID NO: 2123 - DNA, 47 bp, Artificial Sequence
  Description of Artificial Sequence: Synthetic primer
  Description of Combined DNA/RNA Molecule: Synthetic primer
tccggcaataattcccagaacactcgacctcaaccccctatgcctag

SEQ ID NO: 2124 - DNA, 27 bp, Artificial Sequence
  Description of Artificial Sequence: Synthetic primer
  Description of Combined DNA/RNA Molecule: Synthetic primer
ggcgcgtttttattacggtatcggtga

SEQ ID NO: 2125 - DNA, 34 bp, Artificial Sequence
  Description of Artificial Sequence: Synthetic primer
  Description of Combined DNA/RNA Molecule: Synthetic primer
ggtgtcgtggccgaccctatcataacgcaacatt

SEQ ID NO: 2126 - DNA, 48 bp, Artificial Sequence
  Description of Artificial Sequence: Synthetic oligonucleotide
  Description of Combined DNA/RNA Molecule: Synthetic oligonucleotide
tcactatcggcgtagtcaccaggtatcggtggattcgtcgcgcgtaac

SEQ ID NO: 2127 - DNA, 60 bp, Artificial Sequence
  Description of Artificial Sequence: Synthetic oligonucleotide
gtagtcggaagatggcgtagacgtataaagtatatcgatgtggtgactttacccggagga

SEQ ID NO: 2128 - DNA, 25 bp, Artificial Sequence
  Description of Artificial Sequence: Synthetic probe
aagtcgcgcgtagtcggaagatggc

SEQ ID NO: 2129 - DNA, 21 bp, Artificial Sequence
  Description of Artificial Sequence: Synthetic primer
tcactatcggcgtagtcacca

SEQ ID NO: 2130 - DNA, 20 bp, Artificial Sequence
  Description of Artificial Sequence: Synthetic primer
tcctccgggtaaagtcacca

SEQ ID NO: 2131 - DNA, 60 bp, Artificial Sequence
  Description of Artificial Sequence: Synthetic primer
  Description of Combined DNA/RNA Molecule: Synthetic primer
tcctccgggtaaagtcaccaccctatcataacgcaacatcgatatactttatatguctat

SEQ ID NO: 2132 - DNA, 21 bp, Artificial Sequence
  Description of Artificial Sequence: Synthetic primer
  Description of Combined DNA/RNA Molecule: Synthetic primer
ttcgggcgtaaagcgcgggtc

SEQ ID NO: 2133 - DNA, 30 bp, Artificial Sequence
  Description of Artificial Sequence: Synthetic primer
  Description of Combined DNA/RNA Molecule: Synthetic primer
ggtgtcgtggcccgaccctcccgaaaacca

SEQ ID NO: 2134 - DNA, 45 bp, Artificial Sequence
  Description of Artificial Sequence: Synthetic oligonucleotide
  Description of Combined DNA/RNA Molecule: Synthetic oligonucleotide
tcatctgttcgtcagggtccacgcgggttgggaggtaaacgggcc

SEQ ID NO: 2135 - DNA, 49 bp, Artificial Sequence
  Description of Artificial Sequence: Synthetic oligonucleotide
gggttttgcgtttcgaggttttcggatggtggtgactttacccggagga

SEQ ID NO: 2136 - DNA, 32 bp, Artificial Sequence
  Description of Artificial Sequence: Synthetic probe
ttggtaaacgggttttgcgtttcgaggttttc

SEQ ID NO: 2137 - DNA, 21 bp, Artificial Sequence
  Description of Artificial Sequence: Synthetic primer
tcatctgttcgtcagggtcca

SEQ ID NO: 2138 - DNA, 20 bp, Artificial Sequence
  Description of Artificial Sequence: Synthetic primer
tcctccgggtaaagtcacca

SEQ ID NO: 2139 - DNA, 44 bp, Artificial Sequence
  Description of Artificial Sequence: Synthetic primer
  Description of Combined DNA/RNA Molecule: Synthetic primer
tcctccgggtaaagtcaccaccgaccctcccgaaaactgaaact

SEQ ID NO: 2140 - DNA, 23 bp, Artificial Sequence
  Description of Artificial Sequence: Synthetic primer
  Description of Combined DNA/RNA Molecule: Synthetic primer
gggttcgtcgcgtttttcgtttc

SEQ ID NO: 2141 - DNA, 37 bp, Artificial Sequence
  Description of Artificial Sequence: Synthetic primer
  Description of Combined DNA/RNA Molecule: Synthetic primer
ggtgtcgtggtctcttctactcaaacgacgtaaaaag

SEQ ID NO: 2142 - DNA, 56 bp, Artificial Sequence
  Description of Artificial Sequence: Synthetic oligonucleotide
  Description of Combined DNA/RNA Molecule: Synthetic oligonucleotide
ttcgtacctcggcacaccacgtttttcgttttgtttcgtttcgtttttcacgttcc

SEQ ID NO: 2143 - DNA, 71 bp, Artificial Sequence
  Description of Artificial Sequence: Synthetic oligonucleotide
gtttttgtatttttaagtcgtattaagaatttagttttcgatcggtttttttggctccgttactctgtcga

SEQ ID NO: 2144 - DNA, 49 bp, Artificial Sequence
  Description of Artificial Sequence: Synthetic probe
aattttcacgtttttgtatttttaagtcgtattaagaatttagttttcg

SEQ ID NO: 2145 - DNA, 19 bp, Artificial Sequence
  Description of Artificial Sequence: Synthetic primer
ttcgtacctcggcacacca

SEQ ID NO: 2146 - DNA, 20 bp, Artificial Sequence
  Description of Artificial Sequence: Synthetic primer
tcgacagagtaacggagcca

SEQ ID NO: 2147 - DNA, 54 bp, Artificial Sequence
  Description of Artificial Sequence: Synthetic primer
  Description of Combined DNA/RNA Molecule: Synthetic primer
tcgacagagtaacggagccacttctactcaaacgacgtaaaaaaaactgatcgg

SEQ ID NO: 2148 - DNA, 21 bp, Artificial Sequence
  Description of Artificial Sequence: Synthetic primer
  Description of Combined DNA/RNA Molecule: Synthetic primer
ggagggatggttcggcgtttc

SEQ ID NO: 2149 - DNA, 34 bp, Artificial Sequence; identical to SEQ ID NO: 735
  Description of Artificial Sequence: Synthetic primer
  Description of Combined DNA/RNA Molecule: Synthetic primer

SEQ ID NO: 2150 - DNA, 47 bp, Artificial Sequence
  Description of Artificial Sequence: Synthetic oligonucleotide
  Description of Combined DNA/RNA Molecule: Synthetic oligonucleotide
tctacagctagatgcggccagggatggttcggcgttttaagcgttca

SEQ ID NO: 2151 - DNA, 70 bp, Artificial Sequence
  Description of Artificial Sequence: Synthetic oligonucleotide
gtttgttatagatttatttgcgggtcgtttttatttagtattttagaaattggctccgttactctgtcga

SEQ ID NO: 2152 - DNA, 36 bp, Artificial Sequence; identical to SEQ ID NO: 738
  Description of Artificial Sequence: Synthetic probe

SEQ ID NO: 2153 - DNA, 20 bp, Artificial Sequence
  Description of Artificial Sequence: Synthetic primer
tctacagctagatgcggcca

SEQ ID NO: 2154 - DNA, 20 bp, Artificial Sequence
  Description of Artificial Sequence: Synthetic primer
tcgacagagtaacggagcca

SEQ ID NO: 2155 - DNA, 45 bp, Artificial Sequence
  Description of Artificial Sequence: Synthetic primer
  Description of Combined DNA/RNA Molecule: Synthetic primer
tcgacagagtaacggagccaccgaatattcatcccgcgtgcaatc

SEQ ID NO: 2156 - DNA, 26 bp, Artificial Sequence
  Description of Artificial Sequence: Synthetic primer
  Description of Combined DNA/RNA Molecule: Synthetic primer
aggtttggagggcgtttatacgggac

SEQ ID NO: 2157 - DNA, 41 bp, Artificial Sequence
  Description of Artificial Sequence: Synthetic primer
  Description of Combined DNA/RNA Molecule: Synthetic primer
ggtgtcgtggctaaacgatactactcaaaaaccaacaaatg

SEQ ID NO: 2158 - DNA, 53 bp, Artificial Sequence
  Description of Artificial Sequence: Synthetic oligonucleotide
  Description of Combined DNA/RNA Molecule: Synthetic oligonucleotide
tagcgatagtaccgacagtcacttatacggagttttatggttcgtcgcgttcc

SEQ ID NO: 2159 - DNA, 54 bp, Artificial Sequence
  Description of Artificial Sequence: Synthetic oligonucleotide
gtttttttcgtcggttggagagagaagtttttgggtgcggaaacctatcgtcga

SEQ ID NO: 2160 - DNA, 27 bp, Artificial Sequence
  Description of Artificial Sequence: Synthetic probe
aatcgtcgcgtttttttcgtcggttgg

SEQ ID NO: 2161 - DNA, 22 bp, Artificial Sequence
  Description of Artificial Sequence: Synthetic primer
tagcgatagtaccgacagtcac

SEQ ID NO: 2162 - DNA, 20 bp, Artificial Sequence
  Description of Artificial Sequence: Synthetic primer
tcgacgataggtttccgcac

SEQ ID NO: 2163 - DNA, 59 bp, Artificial Sequence
  Description of Artificial Sequence: Synthetic primer
  Description of Combined DNA/RNA Molecule: Synthetic primer
tcgacgataggtttccgcaccgatactactcaaaaaccaacaaatatctaactgctccg

SEQ ID NO: 2164 - DNA, 23 bp, Artificial Sequence
  Description of Artificial Sequence: Synthetic primer
  Description of Combined DNA/RNA Molecule: Synthetic primer
gtttaggtttcgggtggcgtatc

SEQ ID NO: 2165 - DNA, 36 bp, Artificial Sequence
  Description of Artificial Sequence: Synthetic primer
  Description of Combined DNA/RNA Molecule: Synthetic primer
ggtgtcgtggacgttccaaccctttactttccaacg

SEQ ID NO: 2166 - DNA, 56 bp, Artificial Sequence
  Description of Artificial Sequence: Synthetic oligonucleotide
  Description of Combined DNA/RNA Molecule: Synthetic oligonucleotide
tccagggtatttggcgcacatttttggattatattttttaggaggttttgcggtcg

SEQ ID NO: 2167 - DNA, 64 bp, Artificial Sequence
  Description of Artificial Sequence: Synthetic oligonucleotide
ggttaatttttttcggtcgaagaaggttagttatttttttttgggtgcggaaacctatcgtcga

SEQ ID NO: 2168 - DNA, 39 bp, Artificial Sequence
  Description of Artificial Sequence: Synthetic probe
ttgttttgcggttaatttttttcggtcgaagaaggttag

SEQ ID NO: 2169 - DNA, 19 bp, Artificial Sequence
  Description of Artificial Sequence: Synthetic primer
tccagggtatttggcgcac

SEQ ID NO: 2170 - DNA, 20 bp, Artificial Sequence
  Description of Artificial Sequence: Synthetic primer
tcgacgataggtttccgcac

SEQ ID NO: 2171 - DNA, 49 bp, Artificial Sequence
  Description of Artificial Sequence: Synthetic primer
  Description of Combined DNA/RNA Molecule: Synthetic primer
tcgacgataggtttccgcaccaaccctttactttccaacacctgccaag

SEQ ID NO: 2172 - DNA, 29 bp, Artificial Sequence
  Description of Artificial Sequence: Synthetic primer
  Description of Combined DNA/RNA Molecule: Synthetic primer
gtaatttgtttttcggcgtttagcgcgta

SEQ ID NO: 2173 - DNA, 31 bp, Artificial Sequence
  Description of Artificial Sequence: Synthetic primer
  Description of Combined DNA/RNA Molecule: Synthetic primer
ggtgtcgtgggcgaccgctcaacgaaaaact

SEQ ID NO: 2174 - DNA, 48 bp, Artificial Sequence
  Description of Artificial Sequence: Synthetic oligonucleotide
  Description of Combined DNA/RNA Molecule: Synthetic oligonucleotide
tccctcgtcatctcccttacccgtttagcgcgtggtggttctcgtcac

SEQ ID NO: 2175 - DNA, 53 bp, Artificial Sequence
  Description of Artificial Sequence: Synthetic oligonucleotide
gtcgtgttggcgtttttggtttttattaacgtcgggtcttggtgatggagcga

SEQ ID NO: 2176 - DNA, 28 bp, Artificial Sequence
  Description of Artificial Sequence: Synthetic probe
aaggttctcgtcgtgttggcgtttttgg

SEQ ID NO: 2177 - DNA, 21 bp, Artificial Sequence
  Description of Artificial Sequence: Synthetic primer
tccctcgtcatctcccttacc

SEQ ID NO: 2178 - DNA, 19 bp, Artificial Sequence
  Description of Artificial Sequence: Synthetic primer
tcgctccatcaccaagacc

SEQ ID NO: 2179 - DNA, 54 bp, Artificial Sequence
  Description of Artificial Sequence: Synthetic primer
  Description of Combined DNA/RNA Molecule: Synthetic primer
tcgctccatcaccaagacccgaaaaaccaacaaaaaaatcaatacgatgutaac

SEQ ID NO: 2180 - DNA, 25 bp, Artificial Sequence
  Description of Artificial Sequence: Synthetic primer
  Description of Combined DNA/RNA Molecule: Synthetic primer
tcgtttttttcggtttcggcggagg

SEQ ID NO: 2181 - DNA, 39 bp, Artificial Sequence
  Description of Artificial Sequence: Synthetic primer
  Description of Combined DNA/RNA Molecule: Synthetic primer
ggtgtcgtggccaaaaaaaccgaaaaaaacgatcuaaat

SEQ ID NO: 2182 - DNA, 49 bp, Artificial Sequence
  Description of Artificial Sequence: Synthetic oligonucleotide
  Description of Combined DNA/RNA Molecule: Synthetic oligonucleotide
tcataatgttgtcagcccgacctttcggtttcggcggagatctcggtac

SEQ ID NO: 2183 - DNA, 62 bp, Artificial Sequence
  Description of Artificial Sequence: Synthetic oligonucleotide
ggtgtgttttcgggaggagagtatttattaattagaattttagggtcttggtgatggagcga

SEQ ID NO: 2184 - DNA, 44 bp, Artificial Sequence
  Description of Artificial Sequence: Synthetic probe
ttagatctcggtgtgttttcgggaggagagtatttattaattag

SEQ ID NO: 2185 - DNA, 22 bp, Artificial Sequence
  Description of Artificial Sequence: Synthetic primer
tcataatgttgtcagcccgacc

SEQ ID NO: 2186 - DNA, 19 bp, Artificial Sequence
  Description of Artificial Sequence: Synthetic primer
tcgctccatcaccaagacc

SEQ ID NO: 2187 - DNA, 53 bp, Artificial Sequence
  Description of Artificial Sequence: Synthetic primer
  Description of Combined DNA/RNA Molecule: Synthetic primer
tcgctccatcaccaagaccaaaaccgaaaaaaacgatctaaacaactgaaaat

SEQ ID NO: 2188 - DNA, 30 bp, Artificial Sequence
  Description of Artificial Sequence: Synthetic primer
  Description of Combined DNA/RNA Molecule: Synthetic primer
tttttgtttcgagtttttcgttagcgtcgc

SEQ ID NO: 2189 - DNA, 35 bp, Artificial Sequence
  Description of Artificial Sequence: Synthetic primer
  Description of Combined DNA/RNA Molecule: Synthetic primer
ggtgtcgtggtctctcccccatcgaatatcuttcc

SEQ ID NO: 2190 - DNA, 58 bp, Artificial Sequence
  Description of Artificial Sequence: Synthetic oligonucleotide
  Description of Combined DNA/RNA Molecule: Synthetic oligonucleotide
tacgaatcacccgagagttcaagtttcgagtttttcgttagcgtcgtaatctcgttgc

SEQ ID NO: 2191 - DNA, 63 bp, Artificial Sequence
  Description of Artificial Sequence: Synthetic oligonucleotide
gttattgtattgtttttttcggtatcgagcgatttgattcgttgtgggtgggtataggtcaga

SEQ ID NO: 2192 - DNA, 40 bp, Artificial Sequence
  Description of Artificial Sequence: Synthetic probe
tttaatctcgttattgtattgtttttttcggtatcgagcg

SEQ ID NO: 2193 - DNA, 22 bp, Artificial Sequence
  Description of Artificial Sequence: Synthetic primer
tacgaatcacccgagagttcaa

SEQ ID NO: 2194 - DNA, 22 bp, Artificial Sequence
  Description of Artificial Sequence: Synthetic primer
tctgacctatacccacccacaa

SEQ ID NO: 2195 - DNA, 55 bp, Artificial Sequence
  Description of Artificial Sequence: Synthetic primer
  Description of Combined DNA/RNA Molecule: Synthetic primer
tctgacctatacccacccacaaccccatcgaatatctttctaactcgatgaatcg

SEQ ID NO: 2196 - DNA, 36 bp, Artificial Sequence
  Description of Artificial Sequence: Synthetic primer
  Description of Combined DNA/RNA Molecule: Synthetic primer
cgttttttagttatgtacgtttttgtatttcggttg

SEQ ID NO: 2197 - DNA, 34 bp, Artificial Sequence
  Description of Artificial Sequence: Synthetic primer
  Description of Combined DNA/RNA Molecule: Synthetic primer
ggtgtcgtggcgcgtatacgcccgaataauttcc

SEQ ID NO: 2198 - DNA, 47 bp, Artificial Sequence
  Description of Artificial Sequence: Synthetic oligonucleotide
  Description of Combined DNA/RNA Molecule: Synthetic oligonucleotide
tacgaatcacccgagagttcaacggttattgggagcgggatcgtgaa

SEQ ID NO: 2199 - DNA, 54 bp, Artificial Sequence
  Description of Artificial Sequence: Synthetic oligonucleotide
gtggaggttgtatatgcgtattgcgagttttcttgtgggtgggtataggtcaga

SEQ ID NO: 2200 - DNA, 32 bp, Artificial Sequence
  Description of Artificial Sequence: Synthetic probe
ttcgggatcgtggaggttgtatatgcgtattg

SEQ ID NO: 2201 - DNA, 22 bp, Artificial Sequence
  Description of Artificial Sequence: Synthetic primer
tacgaatcacccgagagttcaa

SEQ ID NO: 2202 - DNA, 22 bp, Artificial Sequence
  Description of Artificial Sequence: Synthetic primer
tctgacctatacccacccacaa

SEQ ID NO: 2203 - DNA, 61 bp, Artificial Sequence
  Description of Artificial Sequence: Synthetic primer
  Description of Combined DNA/RNA Molecule: Synthetic primer
tctgacctatacccacccacaagcccgaataatttctaaaaataaacgaaaacttgcaatg

SEQ ID NO: 2204 - DNA, 20 bp, Artificial Sequence
  Description of Artificial Sequence: Synthetic primer
  Description of Combined DNA/RNA Molecule: Synthetic primer
taggcggcggtaggcggtaa

SEQ ID NO: 2205 - DNA, 35 bp, Artificial Sequence
  Description of Artificial Sequence: Synthetic primer
  Description of Combined DNA/RNA Molecule: Synthetic primer
ggtgtcgtggaaacccgaaaaacgcgactautacg

SEQ ID NO: 2206 - DNA, 50 bp, Artificial Sequence
  Description of Artificial Sequence: Synthetic oligonucleotide
  Description of Combined DNA/RNA Molecule: Synthetic oligonucleotide
taggaacacggaggacatcaacggtaggcggtagttgtgtaggtcgttag

SEQ ID NO: 2207 - DNA, 61 bp, Artificial Sequence
  Description of Artificial Sequence: Synthetic oligonucleotide
gttgagagattacgagggttcggtttagttttaattttgttgtgggtgggtataggtcaga

SEQ ID NO: 2208 - DNA, 32 bp, Artificial Sequence
  Description of Artificial Sequence: Synthetic probe
aagtaggtcgttgagagattacgagggttcgg

SEQ ID NO: 2209 - DNA, 21 bp, Artificial Sequence
  Description of Artificial Sequence: Synthetic primer
taggaacacggaggacatcaa

SEQ ID NO: 2210 - DNA, 22 bp, Artificial Sequence
  Description of Artificial Sequence: Synthetic primer
tctgacctatacccacccacaa

SEQ ID NO: 2211 - DNA, 32 bp, Artificial Sequence
  Description of Artificial Sequence: Synthetic primer
  Description of Combined DNA/RNA Molecule: Synthetic primer
gtttttttgcgatattgtagtggtttcgtttg

SEQ ID NO: 2212 - DNA, 33 bp, Artificial Sequence
  Description of Artificial Sequence: Synthetic primer
  Description of Combined DNA/RNA Molecule: Synthetic primer
ggtgtcgtgggaattcgcgccccgaataaacag

SEQ ID NO: 2213 - DNA, 60 bp, Artificial Sequence
  Description of Artificial Sequence: Synthetic oligonucleotide
  Description of Combined DNA/RNA Molecule: Synthetic oligonucleotide
tctcataaacactccggccacgtggtttcgtttatttttttttattttttggatcgtaat

SEQ ID NO: 2214 - DNA, 60 bp, Artificial Sequence
  Description of Artificial Sequence: Synthetic oligonucleotide
gtagcgttttttttatagattattaggatcgacgtttcgggtggctcaataacgggcaga

SEQ ID NO: 2215 - DNA, 43 bp, Artificial Sequence
  Description of Artificial Sequence: Synthetic probe
ccttggatcgtagcgttttttttatagattattaggatcgacg

SEQ ID NO: 2216 - DNA, 21 bp, Artificial Sequence
  Description of Artificial Sequence: Synthetic primer
tctcataaacactccggccac

SEQ ID NO: 2217 - DNA, 20 bp, Artificial Sequence
  Description of Artificial Sequence: Synthetic primer
tctgcccgttattgagccac

SEQ ID NO: 2218 - DNA, 49 bp, Artificial Sequence
  Description of Artificial Sequence: Synthetic primer
  Description of Combined DNA/RNA Molecule: Synthetic primer
tctgcccgttattgagccacccccgaataaacaatcctaacctgaaaca

SEQ ID NO: 2219 - DNA, 28 bp, Artificial Sequence
  Description of Artificial Sequence: Synthetic primer
  Description of Combined DNA/RNA Molecule: Synthetic primer
gtaaattttagagcgaggtacgcgtttc

SEQ ID NO: 2220 - DNA, 33 bp, Artificial Sequence
  Description of Artificial Sequence: Synthetic primer
  Description of Combined DNA/RNA Molecule: Synthetic primer
ggtgtcgtggcgcctctatacccgaacacaacc

SEQ ID NO: 2221 - DNA, 53 bp, Artificial Sequence
  Description of Artificial Sequence: Synthetic oligonucleotide
  Description of Combined DNA/RNA Molecule: Synthetic oligonucleotide
ttgattgggatcgttcgcaccgaggtacgcgtttttaaaggtaggctcgcgac

SEQ ID NO: 2222 - DNA, 53 bp, Artificial Sequence
  Description of Artificial Sequence: Synthetic oligonucleotide
gcggtttttttacgttttggcgttcggtttttcgtggctcaataacgggcaga

SEQ ID NO: 2223 - DNA, 31 bp, Artificial Sequence
  Description of Artificial Sequence: Synthetic probe
tttaggctcgcggtttttttacgttttggcg

SEQ ID NO: 2224 - DNA, 20 bp, Artificial Sequence
  Description of Artificial Sequence: Synthetic primer
ttgattgggatcgttcgcac

SEQ ID NO: 2225 - DNA, 20 bp, Artificial Sequence
  Description of Artificial Sequence: Synthetic primer
tctgcccgttattgagccac

SEQ ID NO: 2226 - DNA, 61 bp, Artificial Sequence
  Description of Artificial Sequence: Synthetic primer
  Description of Combined DNA/RNA Molecule: Synthetic primer
tctgcccgttattgagccacgaacacaactataaaaacactaaatacgaaaaactgaacgt

SEQ ID NO: 2227 - DNA, 23 bp, Artificial Sequence
  Description of Artificial Sequence: Synthetic primer
  Description of Combined DNA/RNA Molecule: Synthetic primer
tagcgcgtttaggagtgcgtcga

SEQ ID NO: 2228 - DNA, 45 bp, Artificial Sequence
  Description of Artificial Sequence: Synthetic primer
  Description of Combined DNA/RNA Molecule: Synthetic primer
ggtgtcgtggaaatatttaaaaccgtttaaaaaaaacaacgattc

SEQ ID NO: 2229 - DNA, 50 bp, Artificial Sequence
  Description of Artificial Sequence: Synthetic oligonucleotide
  Description of Combined DNA/RNA Molecule: Synthetic oligonucleotide
tctgcccaaaatactgcacaacgtttaggagtgcgtcggagactcggagg

SEQ ID NO: 2230 - DNA, 64 bp, Artificial Sequence
  Description of Artificial Sequence: Synthetic oligonucleotide
ggaaattcgtagagattttttaagttagtaggaatttggaaatttgaaactgaggcggtgttca

SEQ ID NO: 2231 - DNA, 45 bp, Artificial Sequence
  Description of Artificial Sequence: Synthetic probe
ttgagactcggaaattcgtagagattttttaagttagtaggaatt

SEQ ID NO: 2232 - DNA, 21 bp, Artificial Sequence
  Description of Artificial Sequence: Synthetic primer
tctgcccaaaatactgcacaa

SEQ ID NO: 2233 - DNA, 21 bp, Artificial Sequence
  Description of Artificial Sequence: Synthetic primer
tgaacaccgcctcagtttcaa

SEQ ID NO: 2234 - DNA, 28 bp, Artificial Sequence
  Description of Artificial Sequence: Synthetic primer
  Description of Combined DNA/RNA Molecule: Synthetic primer
atttaaaatatggcgtttcgggcgggaa

SEQ ID NO: 2235 - DNA, 35 bp, Artificial Sequence
  Description of Artificial Sequence: Synthetic primer
  Description of Combined DNA/RNA Molecule: Synthetic primer
ggtgtcgtggcgacctccgacctaaaaaccucccc

SEQ ID NO: 2236 - DNA, 48 bp, Artificial Sequence
  Description of Artificial Sequence: Synthetic oligonucleotide
  Description of Combined DNA/RNA Molecule: Synthetic oligonucleotide
tatggactgtaccagcccaagcgagggatttgtgtaaattagcggaag

SEQ ID NO: 2237 - DNA, 42 bp, Artificial Sequence
  Description of Artificial Sequence: Synthetic oligonucleotide
ggagaagggacgcgaggatcgttgaaactgaggcggtgttca

SEQ ID NO: 2238 - DNA, 25 bp, Artificial Sequence
  Description of Artificial Sequence: Synthetic probe
ccaattagcggagaagggacgcggg

SEQ ID NO: 2239 - DNA, 20 bp, Artificial Sequence
  Description of Artificial Sequence: Synthetic primer
tatggactgtaccagcccaa

SEQ ID NO: 2240 - DNA, 21 bp, Artificial Sequence
  Description of Artificial Sequence: Synthetic primer
tgaacaccgcctcagtttcaa

SEQ ID NO: 2241 - DNA, 55 bp, Artificial Sequence
  Description of Artificial Sequence: Synthetic primer
  Description of Combined DNA/RNA Molecule: Synthetic primer
tgaacaccgcctcagtttcaactaaaatccctaaccgaaaaaacgacttgatcct

SEQ ID NO: 2242 - DNA, 24 bp, Artificial Sequence
  Description of Artificial Sequence: Synthetic primer
  Description of Combined DNA/RNA Molecule: Synthetic primer
gtttcgtcgttttttcggcgggag

SEQ ID NO: 2243 - DNA, 32 bp, Artificial Sequence
  Description of Artificial Sequence: Synthetic primer
  Description of Combined DNA/RNA Molecule: Synthetic primer
ggtgtcgtggtaaaaccgacgcacgccuaaat

SEQ ID NO: 2244 - DNA, 56 bp, Artificial Sequence
  Description of Artificial Sequence: Synthetic oligonucleotide
  Description of Combined DNA/RNA Molecule: Synthetic oligonucleotide
tttgcctcttgtaggtgccattttttcggcggagaattttttttagttctcgttta

SEQ ID NO: 2245 - DNA, 59 bp, Artificial Sequence
  Description of Artificial Sequence: Synthetic oligonucleotide
gttcgtatagatttttagcgtttcgagttttcgtttttcgtgggcaacgcggatattca

SEQ ID NO: 2246 - DNA, 38 bp, Artificial Sequence
  Description of Artificial Sequence: Synthetic probe
aaagttctcgttcgtatagatttttagcgtttcgagtt

SEQ ID NO: 2247 - DNA, 20 bp, Artificial Sequence
  Description of Artificial Sequence: Synthetic primer
tttgcctcttgtaggtgcca

SEQ ID NO: 2248 - DNA, 19 bp, Artificial Sequence
  Description of Artificial Sequence: Synthetic primer
tgaatatccgcgttgccca

SEQ ID NO: 2249 - DNA, 46 bp, Artificial Sequence
  Description of Artificial Sequence: Synthetic primer
  Description of Combined DNA/RNA Molecule: Synthetic primer
tgaatatccgcgttgcccagcacgcctaaacgcgaaaaatgaaaat

SEQ ID NO: 2250 - DNA, 24 bp, Artificial Sequence
  Description of Artificial Sequence: Synthetic primer
  Description of Combined DNA/RNA Molecule: Synthetic primer
cggtcgtttcgaggatttcgttac

SEQ ID NO: 2251 - DNA, 36 bp, Artificial Sequence
  Description of Artificial Sequence: Synthetic primer
  Description of Combined DNA/RNA Molecule: Synthetic primer
ggtgtcgtggtatcgccaaaaactcttacgcuaaag

SEQ ID NO: 2252 - DNA, 55 bp, Artificial Sequence
  Description of Artificial Sequence: Synthetic oligonucleotide
  Description of Combined DNA/RNA Molecule: Synthetic oligonucleotide
tgtcgcccggtagcaataaaccgtttcgaggatttcgttattaaacgcacgcgcc

SEQ ID NO: 2253 - DNA, 52 bp, Artificial Sequence
  Description of Artificial Sequence: Synthetic oligonucleotide
gcgttttaggtgggtattcgtttcggttcggtttccgcgatctttgcattca

SEQ ID NO: 2254 - DNA, 29 bp, Artificial Sequence
  Description of Artificial Sequence: Synthetic probe
ccaacgcacgcgttttaggtgggtattcg

SEQ ID NO: 2255 - DNA, 21 bp, Artificial Sequence
  Description of Artificial Sequence: Synthetic primer
tgtcgcccggtagcaataaac

SEQ ID NO: 2256 - DNA, 22 bp, Artificial Sequence
  Description of Artificial Sequence: Synthetic primer
tgaatgcaaagatcgcggaaac

SEQ ID NO: 2257 - DNA, 55 bp, Artificial Sequence
  Description of Artificial Sequence: Synthetic primer
  Description of Combined DNA/RNA Molecule: Synthetic primer
tgaatgcaaagatcgcggaaaccgctaaaatcaaactcaaaaacgaactgaaaca

SEQ ID NO: 2258 - DNA, 23 bp, Artificial Sequence
  Description of Artificial Sequence: Synthetic primer
  Description of Combined DNA/RNA Molecule: Synthetic primer
aattgttcgtagcgacgcggata

SEQ ID NO: 2259 - DNA, 41 bp, Artificial Sequence
  Description of Artificial Sequence: Synthetic primer
  Description of Combined DNA/RNA Molecule: Synthetic primer
ggtgtcgtggaaaaccaaacaacgaaatacataaaaaaaag

SEQ ID NO: 2260 - DNA, 55 bp, Artificial Sequence
  Description of Artificial Sequence: Synthetic oligonucleotide
  Description of Combined DNA/RNA Molecule: Synthetic oligonucleotide
tgtgcactagtccacgtgaaacgcgacgcggatgatttatcgaatttctcgcggg

SEQ ID NO: 2261 - DNA, 59 bp, Artificial Sequence
  Description of Artificial Sequence: Synthetic oligonucleotide
gcgaattcggaggattaagttgttagttagtacgttggtttccgcgatctttgcattca

SEQ ID NO: 2262 - DNA, 39 bp, Artificial Sequence
  Description of Artificial Sequence: Synthetic probe
ttatttctcgcgaattcggaggattaagttgttagttag

SEQ ID NO: 2263 - DNA, 22 bp, Artificial Sequence
  Description of Artificial Sequence: Synthetic primer
tgtgcactagtccacgtgaaac

SEQ ID NO: 2264 - DNA, 22 bp, Artificial Sequence
  Description of Artificial Sequence: Synthetic primer
tgaatgcaaagatcgcggaaac

SEQ ID NO: 2265 - DNA, 64 bp, Artificial Sequence
  Description of Artificial Sequence: Synthetic primer
  Description of Combined DNA/RNA Molecule: Synthetic primer
tgaatgcaaagatcgcggaaacccaaacaacgaaatacataaaaaaaaaaataacaatguactg

SEQ ID NO: 2266 - DNA, 24 bp, Artificial Sequence
  Description of Artificial Sequence: Synthetic primer
  Description of Combined DNA/RNA Molecule: Synthetic primer
cgagatttttggcgtcgtcgtcgc

SEQ ID NO: 2267 - DNA, 35 bp, Artificial Sequence
  Description of Artificial Sequence: Synthetic primer
  Description of Combined DNA/RNA Molecule: Synthetic primer
ggtgtcgtggcgtaaaaaaccgacccgatcuctag

SEQ ID NO: 2268 - DNA, 48 bp, Artificial Sequence
  Description of Artificial Sequence: Synthetic oligonucleotide
  Description of Combined DNA/RNA Molecule: Synthetic oligonucleotide
tacagatacggacgggaatcaattttggcgtcgtcgtcgtaacgtacc

SEQ ID NO: 2269 - DNA, 64 bp, Artificial Sequence
  Description of Artificial Sequence: Synthetic oligonucleotide
gtattttttttatgttcggttcgtgtattttggttgtgaaggttgtttacatcctcctgcgtca

SEQ ID NO: 2270 - DNA, 41 bp, Artificial Sequence
  Description of Artificial Sequence: Synthetic probe
tttcgtaacgtattttttttatgttcggttcgtgtattttg

SEQ ID NO: 2271 - DNA, 22 bp, Artificial Sequence
  Description of Artificial Sequence: Synthetic primer
tacagatacggacgggaatcaa

SEQ ID NO: 2272 - DNA, 22 bp, Artificial Sequence
  Description of Artificial Sequence: Synthetic primer
tgacgcaggaggatgtaaacaa

SEQ ID NO: 2273 - DNA, 25 bp, Artificial Sequence
  Description of Artificial Sequence: Synthetic primer
  Description of Combined DNA/RNA Molecule: Synthetic primer
gtggagggtaaagttgcgtcgggag

SEQ ID NO: 2274 - DNA, 36 bp, Artificial Sequence
  Description of Artificial Sequence: Synthetic primer
  Description of Combined DNA/RNA Molecule: Synthetic primer
ggtgtcgtggcgtaaaaaactcgaaaacgccctcct

SEQ ID NO: 2275 - DNA, 47 bp, Artificial Sequence
  Description of Artificial Sequence: Synthetic oligonucleotide
  Description of Combined DNA/RNA Molecule: Synthetic oligonucleotide
ttggcgcaacggtttccaacgtcgaggaatttgtgagttcgcggtag

SEQ ID NO: 2276 - DNA, 60 bp, Artificial Sequence
  Description of Artificial Sequence: Synthetic oligonucleotide
ggtgaaaggtaattagtttttattcgaggtgtcgggagttgtttacatcctcctgcgtca

SEQ ID NO: 2277 - DNA, 38 bp, Artificial Sequence
  Description of Artificial Sequence: Synthetic probe
ccagttcgcggtgaaaggtaattagtttttattcgagg

SEQ ID NO: 2278 - DNA, 19 bp, Artificial Sequence
  Description of Artificial Sequence: Synthetic primer
ttggcgcaacggtttccaa

SEQ ID NO: 2279 - DNA, 22 bp, Artificial Sequence
  Description of Artificial Sequence: Synthetic primer
tgacgcaggaggatgtaaacaa

SEQ ID NO: 2280 - DNA, 47 bp, Artificial Sequence
  Description of Artificial Sequence: Synthetic primer
  Description of Combined DNA/RNA Molecule: Synthetic primer
tgacgcaggaggatgtaaacaaaactcgaaaacgccctcctgacact

SEQ ID NO: 2281 - DNA, 28 bp, Artificial Sequence
  Description of Artificial Sequence: Synthetic primer
  Description of Combined DNA/RNA Molecule: Synthetic primer
ggatagttttgcggaaagttttcgtttc

SEQ ID NO: 2282 - DNA, 46 bp, Artificial Sequence
  Description of Artificial Sequence: Synthetic primer
  Description of Combined DNA/RNA Molecule: Synthetic primer
ggtgtcgtggcctaaccgaaataattataaaaaaaaccatcgctca

SEQ ID NO: 2283 - DNA, 60 bp, Artificial Sequence
  Description of Artificial Sequence: Synthetic oligonucleotide
  Description of Combined DNA/RNA Molecule: Synthetic oligonucleotide
ttcagcagcctggcatcacgaaagttttcgtttttaattttttagttttgcgctcggacc

SEQ ID NO: 2284 - DNA, 57 bp, Artificial Sequence
  Description of Artificial Sequence: Synthetic oligonucleotide
ggattgaagcggcggtttttatttttagtattttcgaggtggagcgctaaggttgca

SEQ ID NO: 2285 - DNA, 22 bp, Artificial Sequence
  Description of Artificial Sequence: Synthetic probe
aatgcgctcggattgaagcggc

SEQ ID NO: 2286 - DNA, 19 bp, Artificial Sequence
  Description of Artificial Sequence: Synthetic primer
ttcagcagcctggcatcac

SEQ ID NO: 2287 - DNA, 19 bp, Artificial Sequence
  Description of Artificial Sequence: Synthetic primer
tgcaaccttagcgctccac

SEQ ID NO: 2288 - DNA, 57 bp, Artificial Sequence
  Description of Artificial Sequence: Synthetic primer
  Description of Combined DNA/RNA Molecule: Synthetic primer
tgcaaccttagcgctccacaaccgaaataattataaaaaaaaccatcgcttgaaaac

SEQ ID NO: 2289 - DNA, 26 bp, Artificial Sequence
  Description of Artificial Sequence: Synthetic primer
  Description of Combined DNA/RNA Molecule: Synthetic primer
tataggacgtcgatggcgatagtttc

SEQ ID NO: 2290 - DNA, 38 bp, Artificial Sequence; identical to SEQ ID NO: 234
  Description of Artificial Sequence: Synthetic primer
  Description of Combined DNA/RNA Molecule: Synthetic primer

SEQ ID NO: 2291 - DNA, 52 bp, Artificial Sequence; identical to SEQ ID NO: 235
  Description of Artificial Sequence: Synthetic oligonucleotide
  Description of Combined DNA/RNA Molecule: Synthetic oligonucleotide

SEQ ID NO: 2292 - DNA, 60 bp, Artificial Sequence; identical to SEQ ID NO: 236
  Description of Artificial Sequence: Synthetic oligonucleotide

SEQ ID NO: 2293 - DNA, 39 bp, Artificial Sequence; identical to SEQ ID NO: 237
  Description of Artificial Sequence: Synthetic probe

SEQ ID NO: 2294 - DNA, 19 bp, Artificial Sequence
  Description of Artificial Sequence: Synthetic primer
ttcagagcacctgcgtacc

SEQ ID NO: 2295 - DNA, 19 bp, Artificial Sequence
  Description of Artificial Sequence: Synthetic primer
ttgagccagccgaagaacc

SEQ ID NO: 2296 - DNA, 54 bp, Artificial Sequence; identical to SEQ ID NO: 240
  Description of Artificial Sequence: Synthetic primer
  Description of Combined DNA/RNA Molecule: Synthetic primer

SEQ ID NO: 2297 - DNA, 27 bp, Artificial Sequence
  Description of Artificial Sequence: Synthetic primer
  Description of Combined DNA/RNA Molecule: Synthetic primer
gtcggagttgagaggttttttcgtttc

SEQ ID NO: 2298 - DNA, 41 bp, Artificial Sequence
  Description of Artificial Sequence: Synthetic primer
  Description of Combined DNA/RNA Molecule: Synthetic primer
ggtgtcgtggcttttctaaacgaaaaacaaaacgcccgact

SEQ ID NO: 2299 - DNA, 53 bp, Artificial Sequence
  Description of Artificial Sequence: Synthetic oligonucleotide
  Description of Combined DNA/RNA Molecule: Synthetic oligonucleotide
tcctagtacctacagtgggcaagagtaaatttgaggttgcggagagtcgggac

SEQ ID NO: 2300 - DNA, 52 bp, Artificial Sequence
  Description of Artificial Sequence: Synthetic oligonucleotide
ggagttgtttgttttttcgttttggaggtcttgaccgctgttatacgttgca

SEQ ID NO: 2301 - DNA, 35 bp, Artificial Sequence
  Description of Artificial Sequence: Synthetic probe
ttgagagtcggagttgtttgttttttcgttttggg

SEQ ID NO: 2302 - DNA, 22 bp, Artificial Sequence
  Description of Artificial Sequence: Synthetic primer
tcctagtacctacagtgggcaa

SEQ ID NO: 2303 - DNA, 22 bp, Artificial Sequence
  Description of Artificial Sequence: Synthetic primer
tgcaacgtataacagcggtcaa

SEQ ID NO: 2304 - DNA, 55 bp, Artificial Sequence
  Description of Artificial Sequence: Synthetic primer
  Description of Combined DNA/RNA Molecule: Synthetic primer
tgcaacgtataacagcggtcaacttttctaaacgaaaaacaaaacgcctgaccct

SEQ ID NO: 2305 - DNA, 20 bp, Artificial Sequence
  Description of Artificial Sequence: Synthetic primer
  Description of Combined DNA/RNA Molecule: Synthetic primer
ggagtcgcgggttgcgtaga

SEQ ID NO: 2306 - DNA, 30 bp, Artificial Sequence
  Description of Artificial Sequence: Synthetic primer
  Description of Combined DNA/RNA Molecule: Synthetic primer
ggtgtcgtggtcgccctacgctcgccgcgt

SEQ ID NO: 2307 - DNA, 45 bp, Artificial Sequence
  Description of Artificial Sequence: Synthetic oligonucleotide
  Description of Combined DNA/RNA Molecule: Synthetic oligonucleotide
tagtttgtcgaaagtcccacaccgtagggaggcgggtggcggtcc

SEQ ID NO: 2308 - DNA, 49 bp, Artificial Sequence
  Description of Artificial Sequence: Synthetic oligonucleotide
ggttttcgcgcgtttttgtcgttttcgggtgcaaaattcaggctgtgca

SEQ ID NO: 2309 - DNA, 21 bp, Artificial Sequence
  Description of Artificial Sequence: Synthetic probe
ttgggtggcggttttcgcgcg

SEQ ID NO: 2310 - DNA, 22 bp, Artificial Sequence
  Description of Artificial Sequence: Synthetic primer
tagtttgtcgaaagtcccacac

SEQ ID NO: 2311 - DNA, 21 bp, Artificial Sequence
  Description of Artificial Sequence: Synthetic primer
tgcacagcctgaattttgcac

SEQ ID NO: 2312 - DNA, 44 bp, Artificial Sequence
  Description of Artificial Sequence: Synthetic primer
  Description of Combined DNA/RNA Molecule: Synthetic primer
tgcacagcctgaattttgcacgcgccgactccgaaaatgacaag

SEQ ID NO: 2313 - DNA, 28 bp, Artificial Sequence
  Description of Artificial Sequence: Synthetic primer
  Description of Combined DNA/RNA Molecule: Synthetic primer
tagtaaggtataagggatcggacgttta

SEQ ID NO: 2314 - DNA, 32 bp, Artificial Sequence
  Description of Artificial Sequence: Synthetic primer
  Description of Combined DNA/RNA Molecule: Synthetic primer
ggtgtcgtggcgctactccctctcgccataat

SEQ ID NO: 2315 - DNA, 52 bp, Artificial Sequence
  Description of Artificial Sequence: Synthetic oligonucleotide
  Description of Combined DNA/RNA Molecule: Synthetic oligonucleotide
tagacacgagcgaggtcaccggacgtttgtttttttagtagcgtggcgtacg

SEQ ID NO: 2316 - DNA, 65 bp, Artificial Sequence
  Description of Artificial Sequence: Synthetic oligonucleotide
gtataagttttttgttatttcggcgtttacgattagtatttgcggtgcaaaattcaggctgtgca

SEQ ID NO: 2317 - DNA, 38 bp, Artificial Sequence
  Description of Artificial Sequence: Synthetic probe
ccgcgtggcgtataagttttttgttatttcggcgttta

SEQ ID NO: 2318 - DNA, 19 bp, Artificial Sequence
  Description of Artificial Sequence: Synthetic primer
tagacacgagcgaggtcac

SEQ ID NO: 2319 - DNA, 21 bp, Artificial Sequence
  Description of Artificial Sequence: Synthetic primer
tgcacagcctgaattttgcac

SEQ ID NO: 2320 - DNA, 53 bp, Artificial Sequence
  Description of Artificial Sequence: Synthetic primer
  Description of Combined DNA/RNA Molecule: Synthetic primer
tgcacagcctgaattttgcacctctcgccataacgcaaatactaattguaaat

SEQ ID NO: 2321 - DNA, 28 bp, Artificial Sequence
  Description of Artificial Sequence: Synthetic primer
  Description of Combined DNA/RNA Molecule: Synthetic primer
gaatcggagttgtttgttttttcgtttc

SEQ ID NO: 2322 - DNA, 39 bp, Artificial Sequence
  Description of Artificial Sequence: Synthetic primer
  Description of Combined DNA/RNA Molecule: Synthetic primer
ggtgtcgtggactctattacgaaacgaattctcccaacg

SEQ ID NO: 2323 - DNA, 43 bp, Artificial Sequence
  Description of Artificial Sequence: Synthetic oligonucleotide
  Description of Combined DNA/RNA Molecule: Synthetic oligonucleotide
ttcttcacagtaccgccacatcgttttggaggtcgagcgttcc

SEQ ID NO: 2324 - DNA, 59 bp, Artificial Sequence
  Description of Artificial Sequence: Synthetic oligonucleotide
gttttgtttttcgtttagaaaagtttggaaatggtgtgggtgtgttgtctggtggtgca

SEQ ID NO: 2325 - DNA, 37 bp, Artificial Sequence
  Description of Artificial Sequence: Synthetic probe
ttgtcgagcgttttgtttttcgtttagaaaagtttgg

SEQ ID NO: 2326 - DNA, 20 bp, Artificial Sequence
  Description of Artificial Sequence: Synthetic primer
ttcttcacagtaccgccaca

SEQ ID NO: 2327 - DNA, 19 bp, Artificial Sequence
  Description of Artificial Sequence: Synthetic primer
tgcaccaccagacaacaca

SEQ ID NO: 2328 - DNA, 28 bp, Artificial Sequence
  Description of Artificial Sequence: Synthetic primer
  Description of Combined DNA/RNA Molecule: Synthetic primer
gaatcggagttgtttgttttttcgtttc

SEQ ID NO: 2329 - DNA, 40 bp, Artificial Sequence
  Description of Artificial Sequence: Synthetic primer
  Description of Combined DNA/RNA Molecule: Synthetic primer
ggtgtcgtggctattacgaaacgaattctcccaacaatcg

SEQ ID NO: 2330 - DNA, 53 bp, Artificial Sequence
  Description of Artificial Sequence: Synthetic oligonucleotide
  Description of Combined DNA/RNA Molecule: Synthetic oligonucleotide
taccctcctagctccgtacaggttgtttgttttttcgttttgggagtcgggta

SEQ ID NO: 2331 - DNA, 57 bp, Artificial Sequence
  Description of Artificial Sequence: Synthetic oligonucleotide
gggcgttttgtttttcgtttagaaaagtttggaaatggtgtgttgtctggtggtgca

SEQ ID NO: 2332 - DNA, 36 bp, Artificial Sequence
  Description of Artificial Sequence: Synthetic probe
aagggagtcgggcgttttgtttttcgtttagaaaag

SEQ ID NO: 2333 - DNA, 20 bp, Artificial Sequence
  Description of Artificial Sequence: Synthetic primer
taccctcctagctccgtaca

SEQ ID NO: 2334 - DNA, 19 bp, Artificial Sequence
  Description of Artificial Sequence: Synthetic primer
tgcaccaccagacaacaca

SEQ ID NO: 2335 - DNA, 24 bp, Artificial Sequence
  Description of Artificial Sequence: Synthetic primer
  Description of Combined DNA/RNA Molecule: Synthetic primer
tttggagttgcggagaatcgggac

SEQ ID NO: 2336 - DNA, 40 bp, Artificial Sequence
  Description of Artificial Sequence: Synthetic primer
  Description of Combined DNA/RNA Molecule: Synthetic primer
ggtgtcgtggcatttccaaacttttctaaacgaaaaacag

SEQ ID NO: 2337 - DNA, 53 bp, Artificial Sequence
  Description of Artificial Sequence: Synthetic oligonucleotide
  Description of Combined DNA/RNA Molecule: Synthetic oligonucleotide
tcatcgccctcagatcttccacggagaatcggagttgtttgttttctcgttcc

SEQ ID NO: 2338 - DNA, 44 bp, Artificial Sequence
  Description of Artificial Sequence: Synthetic oligonucleotide
gttttggaggtcgggcgttttgttggaggatagattggagggca

SEQ ID NO: 2339 - DNA, 24 bp, Artificial Sequence
  Description of Artificial Sequence: Synthetic probe
aattttctcgttttggaggtcggg

SEQ ID NO: 2340 - DNA, 21 bp, Artificial Sequence
  Description of Artificial Sequence: Synthetic primer
tcatcgccctcagatcttcca

SEQ ID NO: 2341 - DNA, 21 bp, Artificial Sequence
  Description of Artificial Sequence: Synthetic primer
tgccctccaatctatcctcca

SEQ ID NO: 2342 - DNA, 60 bp, Artificial Sequence
  Description of Artificial Sequence: Synthetic primer
  Description of Combined DNA/RNA Molecule: Synthetic primer
tgccctccaatctatcctccacatttccaaacttttctaaacgaaaaacaaaatgcccgg

SEQ ID NO: 2343 - DNA, 21 bp, Artificial Sequence
  Description of Artificial Sequence: Synthetic primer
  Description of Combined DNA/RNA Molecule: Synthetic primer
tgaggattgaggtcgcgagga

SEQ ID NO: 2344 - DNA, 31 bp, Artificial Sequence
  Description of Artificial Sequence: Synthetic primer
  Description of Combined DNA/RNA Molecule: Synthetic primer
ggtgtcgtggcacaaaaccccgcccaaccgt

SEQ ID NO: 2345 - DNA, 50 bp, Artificial Sequence
  Description of Artificial Sequence: Synthetic oligonucleotide
  Description of Combined DNA/RNA Molecule: Synthetic oligonucleotide
taaccagttaccaccgccagattgaggtcgcgagggtatattctcgagaa

SEQ ID NO: 2346 - DNA, 48 bp, Artificial Sequence
  Description of Artificial Sequence: Synthetic oligonucleotide
gaggagtacggagttagggttaggtagtggaggatagattggagggca

SEQ ID NO: 2347 - DNA, 32 bp, Artificial Sequence; identical to SEQ ID NO: 1984
  Description of Artificial Sequence: Synthetic probe

SEQ ID NO: 2348 - DNA, 19 bp, Artificial Sequence
  Description of Artificial Sequence: Synthetic primer
taaccagttaccaccgcca

SEQ ID NO: 2349 - DNA, 21 bp, Artificial Sequence
  Description of Artificial Sequence: Synthetic primer
tgccctccaatctatcctcca

SEQ ID NO: 2350 - DNA, 44 bp, Artificial Sequence
  Description of Artificial Sequence: Synthetic primer
  Description of Combined DNA/RNA Molecule: Synthetic primer
tgccctccaatctatcctccacaaaaccccgcccaactgcacag

SEQ ID NO: 2351 - DNA, 27 bp, Artificial Sequence
  Description of Artificial Sequence: Synthetic primer
  Description of Combined DNA/RNA Molecule: Synthetic primer
gtcggagttgagaggttttttcgtttc

SEQ ID NO: 2352 - DNA, 37 bp, Artificial Sequence
  Description of Artificial Sequence: Synthetic primer
  Description of Combined DNA/RNA Molecule: Synthetic primer
ggtgtcgtggtctaaacgaaaaacaaaacgcccgact

SEQ ID NO: 2353 - DNA, 51 bp, Artificial Sequence
  Description of Artificial Sequence: Synthetic oligonucleotide
  Description of Combined DNA/RNA Molecule: Synthetic oligonucleotide
tcgcaccggaattctgaccggagtaaatttgaggttgcggagagtcgggac

SEQ ID NO: 2354 - DNA, 51 bp, Artificial Sequence
  Description of Artificial Sequence: Synthetic oligonucleotide
ggagttgtttgttttttcgttttggaggtcgggtagtttcccatgacggca

SEQ ID NO: 2355 - DNA, 34 bp, Artificial Sequence
  Description of Artificial Sequence: Synthetic probe
ttgagagtcggagttgtttgttttttcgttttgg

SEQ ID NO: 2356 - DNA, 19 bp, Artificial Sequence
  Description of Artificial Sequence: Synthetic primer
tcgcaccggaattctgacc

SEQ ID NO: 2357 - DNA, 20 bp, Artificial Sequence
  Description of Artificial Sequence: Synthetic primer
tgccgtcatgggaaactacc

SEQ ID NO: 2358 - DNA, 49 bp, Artificial Sequence
  Description of Artificial Sequence: Synthetic primer
  Description of Combined DNA/RNA Molecule: Synthetic primer
tgccgtcatgggaaactacctctaaacgaaaaacaaaacgcctgaccct

SEQ ID NO: 2359 - DNA, 22 bp, Artificial Sequence
  Description of Artificial Sequence: Synthetic primer
  Description of Combined DNA/RNA Molecule: Synthetic primer
gcggtgtttttgtgtgcggtga

SEQ ID NO: 2360 - DNA, 32 bp, Artificial Sequence
  Description of Artificial Sequence: Synthetic primer
  Description of Combined DNA/RNA Molecule: Synthetic primer
ggtgtcgtggcctaaccccgacccgaacccgt

SEQ ID NO: 2361 - DNA, 39 bp, Artificial Sequence
  Description of Artificial Sequence: Synthetic oligonucleotide
  Description of Combined DNA/RNA Molecule: Synthetic oligonucleotide
ttgcacgttgtcctgcaccgtgtgcggtgggtgcggcag

SEQ ID NO: 2362 - DNA, 48 bp, Artificial Sequence
  Description of Artificial Sequence: Synthetic oligonucleotide
ggcgatgggttgtttcggttcgtagttcggtagtttcccatgacggca

SEQ ID NO: 2363 - DNA, 21 bp, Artificial Sequence
  Description of Artificial Sequence: Synthetic probe
tttgggtgcggcgatgggttg

SEQ ID NO: 2364 - DNA, 19 bp, Artificial Sequence
  Description of Artificial Sequence: Synthetic primer
ttgcacgttgtcctgcacc

SEQ ID NO: 2365 - DNA, 20 bp, Artificial Sequence
  Description of Artificial Sequence: Synthetic primer
tgccgtcatgggaaactacc

SEQ ID NO: 2366 - DNA, 45 bp, Artificial Sequence
  Description of Artificial Sequence: Synthetic primer
  Description of Combined DNA/RNA Molecule: Synthetic primer
tgccgtcatgggaaactacctcccctcgaactacgaactgaaacg

SEQ ID NO: 2367 - DNA, 24 bp, Artificial Sequence
  Description of Artificial Sequence: Synthetic primer
  Description of Combined DNA/RNA Molecule: Synthetic primer
agggttaggtaggttgtgcggtta

SEQ ID NO: 2368 - DNA, 32 bp, Artificial Sequence
  Description of Artificial Sequence: Synthetic primer
  Description of Combined DNA/RNA Molecule: Synthetic primer
ggtgtcgtggtctctccgcttcccgacccgcg

SEQ ID NO: 2369 - DNA, 43 bp, Artificial Sequence
  Description of Artificial Sequence: Synthetic oligonucleotide
  Description of Combined DNA/RNA Molecule: Synthetic oligonucleotide
tgcttacccacgatgcaccgtaggttgtgcggttgagcgggac

SEQ ID NO: 2370 - DNA, 48 bp, Artificial Sequence
  Description of Artificial Sequence: Synthetic oligonucleotide
ggagttttgtgttttattgcggagtgcgggtcgtatgacttgctcgca

SEQ ID NO: 2371 - DNA, 31 bp, Artificial Sequence
  Description of Artificial Sequence: Synthetic probe
ttgttgagcggagttttgtgttttattgcgg

SEQ ID NO: 2372 - DNA, 19 bp, Artificial Sequence
  Description of Artificial Sequence: Synthetic primer
tgcttacccacgatgcacc

SEQ ID NO: 2373 - DNA, 20 bp, Artificial Sequence
  Description of Artificial Sequence: Synthetic primer
tgcgagcaagtcatacgacc

SEQ ID NO: 2374 - DNA, 42 bp, Artificial Sequence
  Description of Artificial Sequence: Synthetic primer
  Description of Combined DNA/RNA Molecule: Synthetic primer
tgcgagcaagtcatacgaccctccgcttcccgacctgcactt

SEQ ID NO: 2375 - DNA, 27 bp, Artificial Sequence
  Description of Artificial Sequence: Synthetic primer
  Description of Combined DNA/RNA Molecule: Synthetic primer
agggtatattttcgagaggtacgggac

SEQ ID NO: 2376 - DNA, 31 bp, Artificial Sequence
  Description of Artificial Sequence: Synthetic primer
  Description of Combined DNA/RNA Molecule: Synthetic primer
ggtgtcgtggctctccgcttcccgacccgcg

SEQ ID NO: 2377 - DNA, 43 bp, Artificial Sequence
  Description of Artificial Sequence: Synthetic oligonucleotide
  Description of Combined DNA/RNA Molecule: Synthetic oligonucleotide
ttacaggccgcatagcaacgtaggttgtgcggttgagcgggac

SEQ ID NO: 2378 - DNA, 47 bp, Artificial Sequence
  Description of Artificial Sequence: Synthetic oligonucleotide
ggagttttgtgttttattgcggagtgcggttgagacatgggctcgca

SEQ ID NO: 2379 - DNA, 32 bp, Artificial Sequence
  Description of Artificial Sequence: Synthetic probe
ttgttgagcggagttttgtgttttattgcgga

SEQ ID NO: 2380 - DNA, 19 bp, Artificial Sequence
  Description of Artificial Sequence: Synthetic primer
ttacaggccgcatagcaac

SEQ ID NO: 2381 - DNA, 19 bp, Artificial Sequence
  Description of Artificial Sequence: Synthetic primer
tgcgagcccatgtctcaac

SEQ ID NO: 2382 - DNA, 41 bp, Artificial Sequence
  Description of Artificial Sequence: Synthetic primer
  Description of Combined DNA/RNA Molecule: Synthetic primer
tgcgagcccatgtctcaacctccgcttcccgacctgcactt

SEQ ID NO: 2383 - DNA, 20 bp, Artificial Sequence
  Description of Artificial Sequence: Synthetic primer
  Description of Combined DNA/RNA Molecule: Synthetic primer
gttgtgcggttgggcgggac

SEQ ID NO: 2384 - DNA, 38 bp, Artificial Sequence
  Description of Artificial Sequence: Synthetic primer
  Description of Combined DNA/RNA Molecule: Synthetic primer
ggtgtcgtggctaatccgcatccaacgaattacacaat

SEQ ID NO: 2385 - DNA, 47 bp, Artificial Sequence
  Description of Artificial Sequence: Synthetic oligonucleotide
  Description of Combined DNA/RNA Molecule: Synthetic oligonucleotide
ttcgcctaccgcagtgaacggcggagttttgtgttttatcgcggaac

SEQ ID NO: 2386 - DNA, 38 bp, Artificial Sequence
  Description of Artificial Sequence: Synthetic oligonucleotide
ggagtgcgggtcgggaagcgttgagacatgggctcgca

SEQ ID NO: 2387 - DNA, 23 bp, Artificial Sequence
  Description of Artificial Sequence: Synthetic probe
aattatcgcggagtgcgggtcgg

SEQ ID NO: 2388 - DNA, 19 bp, Artificial Sequence
  Description of Artificial Sequence: Synthetic primer
ttcgcctaccgcagtgaac

SEQ ID NO: 2389 - DNA, 19 bp, Artificial Sequence
  Description of Artificial Sequence: Synthetic primer
tgcgagcccatgtctcaac

SEQ ID NO: 2390 - DNA, 52 bp, Artificial Sequence
  Description of Artificial Sequence: Synthetic primer
  Description of Combined DNA/RNA Molecule: Synthetic primer
tgcgagcccatgtctcaacacgaattacacaactacttctctctctgcttct

SEQ ID NO: 2391 - DNA, 29 bp, Artificial Sequence
  Description of Artificial Sequence: Synthetic primer
  Description of Combined DNA/RNA Molecule: Synthetic primer
gcgtagtaggagtaggatttttacgattc

SEQ ID NO: 2392 - DNA, 31 bp, Artificial Sequence
  Description of Artificial Sequence: Synthetic primer
  Description of Combined DNA/RNA Molecule: Synthetic primer
ggtgtcgtggcgcgcactcaccgatccgcgg

SEQ ID NO: 2393 - DNA, 59 bp, Artificial Sequence
  Description of Artificial Sequence: Synthetic oligonucleotide
  Description of Combined DNA/RNA Molecule: Synthetic oligonucleotide
ttcgcctaccgcagtgaacgtaggatttttacgattttaaggcggttaatactcgggac

SEQ ID NO: 2394 - DNA, 51 bp, Artificial Sequence
  Description of Artificial Sequence: Synthetic oligonucleotide
ggagtaaattggtgtcgttggagaagtatcgcgttgagacatgggctcgca

SEQ ID NO: 2395 - DNA, 33 bp, Artificial Sequence
  Description of Artificial Sequence: Synthetic probe
aaaatactcggagtaaattggtgtcgttggaga

SEQ ID NO: 2396 - DNA, 19 bp, Artificial Sequence
  Description of Artificial Sequence: Synthetic primer
ttcgcctaccgcagtgaac

SEQ ID NO: 2397 - DNA, 19 bp, Artificial Sequence
  Description of Artificial Sequence: Synthetic primer
tgcgagcccatgtctcaac

SEQ ID NO: 2398 - DNA, 41 bp, Artificial Sequence
  Description of Artificial Sequence: Synthetic primer
  Description of Combined DNA/RNA Molecule: Synthetic primer
tgcgagcccatgtctcaacgcactcaccgatccgtgatacc

SEQ ID NO: 2399 - DNA, 21 bp, Artificial Sequence
  Description of Artificial Sequence: Synthetic primer
  Description of Combined DNA/RNA Molecule: Synthetic primer
gttggtcgtggcggtcggcgt

SEQ ID NO: 2400 - DNA, 32 bp, Artificial Sequence
  Description of Artificial Sequence: Synthetic primer
  Description of Combined DNA/RNA Molecule: Synthetic primer
ggtgtcgtggccaacgccctaaacgcacgcag

SEQ ID NO: 2401 - DNA, 60 bp, Artificial Sequence
  Description of Artificial Sequence: Synthetic oligonucleotide
  Description of Combined DNA/RNA Molecule: Synthetic oligonucleotide
ttgcatttcgttagcgacacagttttagaggagggcgatgaatatattatatctcgggcc

SEQ ID NO: 2402 - DNA, 52 bp, Artificial Sequence
  Description of Artificial Sequence: Synthetic oligonucleotide
gggttcgggttttagttgttgttatcgttgcgtgtgagtcgatctacccgca

SEQ ID NO: 2403 - DNA, 36 bp, Artificial Sequence
  Description of Artificial Sequence: Synthetic probe
aaatatctcgggttcgggttttagttgttgttatcg

SEQ ID NO: 2404 - DNA, 21 bp, Artificial Sequence
  Description of Artificial Sequence: Synthetic primer
ttgcatttcgttagcgacaca

SEQ ID NO: 2405 - DNA, 20 bp, Artificial Sequence
  Description of Artificial Sequence: Synthetic primer
tgcgggtagatcgactcaca

SEQ ID NO: 2406 - DNA, 44 bp, Artificial Sequence
  Description of Artificial Sequence: Synthetic primer
  Description of Combined DNA/RNA Molecule: Synthetic primer
tgcgggtagatcgactcacaccaacgccctaaacgcatgcaaca

SEQ ID NO: 2407 - DNA, 23 bp, Artificial Sequence
  Description of Artificial Sequence: Synthetic primer
  Description of Combined DNA/RNA Molecule: Synthetic primer
gttagaggtagcgagagcgggtc

SEQ ID NO: 2408 - DNA, 32 bp, Artificial Sequence
  Description of Artificial Sequence: Synthetic primer
  Description of Combined DNA/RNA Molecule: Synthetic primer
ggtgtcgtggaccgtctctacgaccgccgcgt

SEQ ID NO: 2409 - DNA, 52 bp, Artificial Sequence
  Description of Artificial Sequence: Synthetic oligonucleotide
  Description of Combined DNA/RNA Molecule: Synthetic oligonucleotide
ttgcatttcgttagcgacacacgggttagagtttatggttggtgatcgggcc

SEQ ID NO: 2410 - DNA, 42 bp, Artificial Sequence
  Description of Artificial Sequence: Synthetic oligonucleotide
gggttggtcgcggattcggacgtgtgagtcgatctacccgca

SEQ ID NO: 2411 - DNA, 25 bp, Artificial Sequence
  Description of Artificial Sequence: Synthetic probe
aaggtgatcgggttggtcgcggatt

SEQ ID NO: 2412 - DNA, 21 bp, Artificial Sequence
  Description of Artificial Sequence: Synthetic primer
ttgcatttcgttagcgacaca

SEQ ID NO: 2413 - DNA, 20 bp, Artificial Sequence
  Description of Artificial Sequence: Synthetic primer
tgcgggtagatcgactcaca

SEQ ID NO: 2414 - DNA, 41 bp, Artificial Sequence
  Description of Artificial Sequence: Synthetic primer
  Description of Combined DNA/RNA Molecule: Synthetic primer
tgcgggtagatcgactcacacgctcccgaccgtctgaatct

SEQ ID NO: 2415 - DNA, 20 bp, Artificial Sequence
  Description of Artificial Sequence: Synthetic primer
  Description of Combined DNA/RNA Molecule: Synthetic primer
tttcgcgaggttcgcgtcga

SEQ ID NO: 2416 - DNA, 37 bp, Artificial Sequence
  Description of Artificial Sequence: Synthetic primer
  Description of Combined DNA/RNA Molecule: Synthetic primer
ggtgtcgtggtttatccttaactacgcctccacccct

SEQ ID NO: 2417 - DNA, 50 bp, Artificial Sequence
  Description of Artificial Sequence: Synthetic oligonucleotide
  Description of Combined DNA/RNA Molecule: Synthetic oligonucleotide
taccactcatcttctgcgacaggcgggaggaggtgaattattctcggacc

SEQ ID NO: 2418 - DNA, 64 bp, Artificial Sequence
  Description of Artificial Sequence: Synthetic oligonucleotide
ggattaattatttcggagtcgttttttcgtcgttttaaatgttgtgtgagtcgatctacccgca

SEQ ID NO: 2419 - DNA, 39 bp, Artificial Sequence
  Description of Artificial Sequence: Synthetic probe
cctattctcggattaattatttcggagtcgttttttcgt

SEQ ID NO: 2420 - DNA, 21 bp, Artificial Sequence
  Description of Artificial Sequence: Synthetic primer
taccactcatcttctgcgaca

SEQ ID NO: 2421 - DNA, 20 bp, Artificial Sequence
  Description of Artificial Sequence: Synthetic primer
tgcgggtagatcgactcaca

SEQ ID NO: 2422 - DNA, 49 bp, Artificial Sequence
  Description of Artificial Sequence: Synthetic primer
  Description of Combined DNA/RNA Molecule: Synthetic primer
tgcgggtagatcgactcacacctccacccccaacatttaaaatgacgag

SEQ ID NO: 2423 - DNA, 20 bp, Artificial Sequence
  Description of Artificial Sequence: Synthetic primer
  Description of Combined DNA/RNA Molecule: Synthetic primer
gtgtcggcggtaggcggtga

SEQ ID NO: 2424 - DNA, 30 bp, Artificial Sequence
  Description of Artificial Sequence: Synthetic primer
  Description of Combined DNA/RNA Molecule: Synthetic primer
ggtgtcgtggccgccgcgtacctaacgctt

SEQ ID NO: 2425 - DNA, 50 bp, Artificial Sequence
  Description of Artificial Sequence: Synthetic oligonucleotide
  Description of Combined DNA/RNA Molecule: Synthetic oligonucleotide
tctcatgggcgctagtatcaacggcggtggttgtagaaagggctcggtta

SEQ ID NO: 2426 - DNA, 41 bp, Artificial Sequence
  Description of Artificial Sequence: Synthetic oligonucleotide
ggtcgcggtttcgggaggcgtttccctgattgatacccgca

SEQ ID NO: 2427 - DNA, 21 bp, Artificial Sequence
  Description of Artificial Sequence: Synthetic probe
ttagggctcggtcgcggtttc

SEQ ID NO: 2428 - DNA, 22 bp, Artificial Sequence
  Description of Artificial Sequence: Synthetic primer
tctcatgggcgctagtatcaac

SEQ ID NO: 2429 - DNA, 22 bp, Artificial Sequence
  Description of Artificial Sequence: Synthetic primer
tgcgggtatcaatcagggaaac

SEQ ID NO: 2430 - DNA, 47 bp, Artificial Sequence
  Description of Artificial Sequence: Synthetic primer
  Description of Combined DNA/RNA Molecule: Synthetic primer
tgcgggtatcaatcagggaaaccgtacctaaacgctccgctgccgct

SEQ ID NO: 2431 - DNA, 30 bp, Artificial Sequence
  Description of Artificial Sequence: Synthetic primer
  Description of Combined DNA/RNA Molecule: Synthetic primer
ggtttcgtaagtgtttatttgagtcgggaa

SEQ ID NO: 2432 - DNA, 33 bp, Artificial Sequence
  Description of Artificial Sequence: Synthetic primer
  Description of Combined DNA/RNA Molecule: Synthetic primer
ggtgtcgtggcctcaccgcgaaaacgaaaacgg

SEQ ID NO: 2433 - DNA, 54 bp, Artificial Sequence
  Description of Artificial Sequence: Synthetic oligonucleotide
  Description of Combined DNA/RNA Molecule: Synthetic oligonucleotide
tggatcgagacggaatgcaacgtgtttatttgagtcgggagaggttctcgggct

SEQ ID NO: 2434 - DNA, 63 bp, Artificial Sequence
  Description of Artificial Sequence: Synthetic oligonucleotide
gggtcgttttaattgttcgttttatttggtagttcgttttcgtttccctgattgatacccgca

SEQ ID NO: 2435 - DNA, 38 bp, Artificial Sequence
  Description of Artificial Sequence: Synthetic probe
ttggttctcgggtcgttttaattgttcgttttatttgg

SEQ ID NO: 2436 - DNA, 21 bp, Artificial Sequence
  Description of Artificial Sequence: Synthetic primer
tggatcgagacggaatgcaac

SEQ ID NO: 2437 - DNA, 22 bp, Artificial Sequence
  Description of Artificial Sequence: Synthetic primer
tgcgggtatcaatcagggaaac

SEQ ID NO: 2438 - DNA, 51 bp, Artificial Sequence
  Description of Artificial Sequence: Synthetic primer
  Description of Combined DNA/RNA Molecule: Synthetic primer
tgcgggtatcaatcagggaaacaccgcgaaaacgaaaacgaaaatgaactg

SEQ ID NO: 2439 - DNA, 23 bp, Artificial Sequence
  Description of Artificial Sequence: Synthetic primer
  Description of Combined DNA/RNA Molecule: Synthetic primer
ggtttatttacgggcggcggtgg

SEQ ID NO: 2440 - DNA, 31 bp, Artificial Sequence
  Description of Artificial Sequence: Synthetic primer
  Description of Combined DNA/RNA Molecule: Synthetic primer
ggtgtcgtggtccgactcccgctcaaccgct

SEQ ID NO: 2441 - DNA, 48 bp, Artificial Sequence
  Description of Artificial Sequence: Synthetic oligonucleotide
  Description of Combined DNA/RNA Molecule: Synthetic oligonucleotide
tcctgagggacaaatacacacccgggtgggtcggagtttacgcgggta

SEQ ID NO: 2442 - DNA, 40 bp, Artificial Sequence
  Description of Artificial Sequence: Synthetic oligonucleotide
gggcgattttcgggcggcgggtaggtaaggaagtcacgca

SEQ ID NO: 2443 - DNA, 24 bp, Artificial Sequence
  Description of Artificial Sequence: Synthetic probe
cctttacgcgggcgattttcgggc

SEQ ID NO: 2444 - DNA, 22 bp, Artificial Sequence
  Description of Artificial Sequence: Synthetic primer
tcctgagggacaaatacacacc

SEQ ID NO: 2445 - DNA, 21 bp, Artificial Sequence
  Description of Artificial Sequence: Synthetic primer
tgcgtgacttccttacctacc

SEQ ID NO: 2446 - DNA, 42 bp, Artificial Sequence
  Description of Artificial Sequence: Synthetic primer
  Description of Combined DNA/RNA Molecule: Synthetic primer
tgcgtgacttccttacctacctcccgctcaaccgctgccgct

SEQ ID NO: 2447 - DNA, 28 bp, Artificial Sequence
  Description of Artificial Sequence: Synthetic primer
  Description of Combined DNA/RNA Molecule: Synthetic primer
tcggttatttaggatgaggttgcggtgg

SEQ ID NO: 2448 - DNA, 33 bp, Artificial Sequence
  Description of Artificial Sequence: Synthetic primer
  Description of Combined DNA/RNA Molecule: Synthetic primer
ggtgtcgtgggcgtatttcccccgactauacca

SEQ ID NO: 2449 - DNA, 49 bp, Artificial Sequence
  Description of Artificial Sequence: Synthetic oligonucleotide
  Description of Combined DNA/RNA Molecule: Synthetic oligonucleotide
ttgcaacaggctaccgaccggtgatataggagttgcagggtgtcgggac

SEQ ID NO: 2450 - DNA, 48 bp, Artificial Sequence
  Description of Artificial Sequence: Synthetic oligonucleotide
ggagttagggtcggtgataagtgggtgggtaggtaaggaagtcacgca

SEQ ID NO: 2451 - DNA, 23 bp, Artificial Sequence
  Description of Artificial Sequence: Synthetic probe
ttgggtgtcggagttagggtcgg

SEQ ID NO: 2452 - DNA, 19 bp, Artificial Sequence
  Description of Artificial Sequence: Synthetic primer
ttgcaacaggctaccgacc

SEQ ID NO: 2453 - DNA, 21 bp, Artificial Sequence
  Description of Artificial Sequence: Synthetic primer
tgcgtgacttccttacctacc

SEQ ID NO: 2454 - DNA, 45 bp, Artificial Sequence
  Description of Artificial Sequence: Synthetic primer
  Description of Combined DNA/RNA Molecule: Synthetic primer
tgcgtgacttccttacctacccccgactataccgccactgaccat

SEQ ID NO: 2455 - DNA, 27 bp, Artificial Sequence
  Description of Artificial Sequence: Synthetic primer
  Description of Combined DNA/RNA Molecule: Synthetic primer
gcgaagaggaagataggttttcgggca

SEQ ID NO: 2456 - DNA, 32 bp, Artificial Sequence
  Description of Artificial Sequence: Synthetic primer
  Description of Combined DNA/RNA Molecule: Synthetic primer
ggtgtcgtggccgaaaacccgacgcaacttat

SEQ ID NO: 2457 - DNA, 47 bp, Artificial Sequence
  Description of Artificial Sequence: Synthetic oligonucleotide
  Description of Combined DNA/RNA Molecule: Synthetic oligonucleotide
taagcctgcttttccgaaacaagataggttttcgggcgttgcggcac

SEQ ID NO: 2458 - DNA, 58 bp, Artificial Sequence
  Description of Artificial Sequence: Synthetic oligonucleotide
ggcgtcgagttttcggttgttttaattttttaggttgttgtattgcgccaggatagca

SEQ ID NO: 2459 - DNA, 24 bp, Artificial Sequence
  Description of Artificial Sequence: Synthetic probe
ttgcgttgcggcgtcgagttttcg

SEQ ID NO: 2460 - DNA, 22 bp, Artificial Sequence
  Description of Artificial Sequence: Synthetic primer
taagcctgcttttccgaaacaa

SEQ ID NO: 2461 - DNA, 21 bp, Artificial Sequence
  Description of Artificial Sequence: Synthetic primer
tgctatcctggcgcaatacaa

SEQ ID NO: 2462 - DNA, 48 bp, Artificial Sequence
  Description of Artificial Sequence: Synthetic primer
  Description of Combined DNA/RNA Molecule: Synthetic primer
tgctatcctggcgcaatacaagaaaacccgacgcaacttactgaacag

SEQ ID NO: 2463 - DNA, 23 bp, Artificial Sequence
  Description of Artificial Sequence: Synthetic primer
  Description of Combined DNA/RNA Molecule: Synthetic primer
gaggtttttttcggaggcggaga

SEQ ID NO: 2464 - DNA, 35 bp, Artificial Sequence
  Description of Artificial Sequence: Synthetic primer
  Description of Combined DNA/RNA Molecule: Synthetic primer
ggtgtcgtggaaaaaaccccgaaaaccgaaaacct

SEQ ID NO: 2465 - DNA, 46 bp, Artificial Sequence
  Description of Artificial Sequence: Synthetic oligonucleotide
  Description of Combined DNA/RNA Molecule: Synthetic oligonucleotide
ttggcaactctccacccaagaggcgaaggtaattaagcagcgggag

SEQ ID NO: 2466 - DNA, 38 bp, Artificial Sequence
  Description of Artificial Sequence: Synthetic oligonucleotide
ggagagtggcgggtcggttgtattgcgccaggatagca

SEQ ID NO: 2467 - DNA, 20 bp, Artificial Sequence
  Description of Artificial Sequence: Synthetic probe
ccaagcagcggagagtggcg

SEQ ID NO: 2468 - DNA, 19 bp, Artificial Sequence
  Description of Artificial Sequence: Synthetic primer
ttggcaactctccacccaa

SEQ ID NO: 2469 - DNA, 21 bp, Artificial Sequence
  Description of Artificial Sequence: Synthetic primer
tgctatcctggcgcaatacaa

SEQ ID NO: 2470 - DNA, 47 bp, Artificial Sequence
  Description of Artificial Sequence: Synthetic primer
  Description of Combined DNA/RNA Molecule: Synthetic primer
tgctatcctggcgcaatacaaaaaaccgaaaacccaacgctgaccca

SEQ ID NO: 2471 - DNA, 26 bp, Artificial Sequence
  Description of Artificial Sequence: Synthetic primer
  Description of Combined DNA/RNA Molecule: Synthetic primer
taggttacgaggtttttcgtcgtttc

SEQ ID NO: 2472 - DNA, 37 bp, Artificial Sequence
  Description of Artificial Sequence: Synthetic primer
  Description of Combined DNA/RNA Molecule: Synthetic primer
ggtgtcgtggccgacacccaaacaaataacgacgacg

SEQ ID NO: 2473 - DNA, 57 bp, Artificial Sequence
  Description of Artificial Sequence: Synthetic oligonucleotide
  Description of Combined DNA/RNA Molecule: Synthetic oligonucleotide
tcgacgaatctgctcagacaacgtcgtttttattttgcgttttcggtatctcgggcc

SEQ ID NO: 2474 - DNA, 55 bp, Artificial Sequence
  Description of Artificial Sequence: Synthetic oligonucleotide
gggattttcgcgttcgcgttatttatttttttgtcgttgaagcagcgtctgagca

SEQ ID NO: 2475 - DNA, 34 bp, Artificial Sequence
  Description of Artificial Sequence: Synthetic probe
ttgtatctcgggattttcgcgttcgcgttattta

SEQ ID NO: 2476 - DNA, 21 bp, Artificial Sequence
  Description of Artificial Sequence: Synthetic primer
tcgacgaatctgctcagacaa

SEQ ID NO: 2477 - DNA, 19 bp, Artificial Sequence
  Description of Artificial Sequence: Synthetic primer
tgctcagacgctgcttcaa

SEQ ID NO: 2478 - DNA, 48 bp, Artificial Sequence
  Description of Artificial Sequence: Synthetic primer
  Description of Combined DNA/RNA Molecule: Synthetic primer
tgctcagacgctgcttcaaccgacacccaaacaaataacgatgacaag

SEQ ID NO: 2479 - DNA, 21 bp, Artificial Sequence
  Description of Artificial Sequence: Synthetic primer
  Description of Combined DNA/RNA Molecule: Synthetic primer
tttagcgtgaggtcgcggcga

SEQ ID NO: 2480 - DNA, 36 bp, Artificial Sequence
  Description of Artificial Sequence: Synthetic primer
  Description of Combined DNA/RNA Molecule: Synthetic primer
ggtgtcgtggaacgacaaccgacgatacaacaacca

SEQ ID NO: 2481 - DNA, 64 bp, Artificial Sequence
  Description of Artificial Sequence: Synthetic oligonucleotide
  Description of Combined DNA/RNA Molecule: Synthetic oligonucleotide
tcgacgaatctgctcagacaagttttgtttttattttgtgtttattttcgttcgttctcgttta

SEQ ID NO: 2482 - DNA, 59 bp, Artificial Sequence
  Description of Artificial Sequence: Synthetic oligonucleotide
gttcgttttagtatacgtatttatattttgggtcggtcggttgaagcagcgtctgagca

SEQ ID NO: 2483 - DNA, 44 bp, Artificial Sequence
  Description of Artificial Sequence: Synthetic probe
aacgttctcgttcgttttagtatacgtatttatattttgggtcg

SEQ ID NO: 2484 - DNA, 21 bp, Artificial Sequence
  Description of Artificial Sequence: Synthetic primer
tcgacgaatctgctcagacaa

SEQ ID NO: 2485 - DNA, 19 bp, Artificial Sequence
  Description of Artificial Sequence: Synthetic primer
tgctcagacgctgcttcaa

SEQ ID NO: 2486 - DNA, 47 bp, Artificial Sequence
  Description of Artificial Sequence: Synthetic primer
  Description of Combined DNA/RNA Molecule: Synthetic primer
tgctcagacgctgcttcaagacaaccgacgatacaacaactgaccgg

SEQ ID NO: 2487 - DNA, 20 bp, Artificial Sequence
  Description of Artificial Sequence: Synthetic primer
  Description of Combined DNA/RNA Molecule: Synthetic primer
cggttgttcgggcgcgtagg

SEQ ID NO: 2488 - DNA, 38 bp, Artificial Sequence
  Description of Artificial Sequence: Synthetic primer
  Description of Combined DNA/RNA Molecule: Synthetic primer
ggtgtcgtggcgctcccctaactaaatcgaaaaacgag

SEQ ID NO: 2489 - DNA, 49 bp, Artificial Sequence
  Description of Artificial Sequence: Synthetic oligonucleotide
  Description of Combined DNA/RNA Molecule: Synthetic oligonucleotide
tttccgccgctacaaccaacgggcgcgtagaataagtagttatcgttga

SEQ ID NO: 2490 - DNA, 58 bp, Artificial Sequence
  Description of Artificial Sequence: Synthetic oligonucleotide
gttagggtcgataaagttgtttttcgaggagttgagattttgaagcagcgtctgagca

SEQ ID NO: 2491 - DNA, 38 bp, Artificial Sequence
  Description of Artificial Sequence: Synthetic probe
aaagttatcgttagggtcgataaagttgtttttcgagg

SEQ ID NO: 2492 - DNA, 19 bp, Artificial Sequence
  Description of Artificial Sequence: Synthetic primer
tttccgccgctacaaccaa

SEQ ID NO: 2493 - DNA, 19 bp, Artificial Sequence
  Description of Artificial Sequence: Synthetic primer
tgctcagacgctgcttcaa

SEQ ID NO: 2494 - DNA, 50 bp, Artificial Sequence
  Description of Artificial Sequence: Synthetic primer
  Description of Combined DNA/RNA Molecule: Synthetic primer
tgctcagacgctgcttcaacgctcccctaactaaatcgaaaaatgaaaac

SEQ ID NO: 2495 - DNA, 20 bp, Artificial Sequence
  Description of Artificial Sequence: Synthetic primer
  Description of Combined DNA/RNA Molecule: Synthetic primer
ggtggttgcggtcgcgtttc

SEQ ID NO: 2496 - DNA, 30 bp, Artificial Sequence
  Description of Artificial Sequence: Synthetic primer
  Description of Combined DNA/RNA Molecule: Synthetic primer
ggtgtcgtggcgccgaacctacgcacgaca

SEQ ID NO: 2497 - DNA, 55 bp, Artificial Sequence
  Description of Artificial Sequence: Synthetic oligonucleotide
  Description of Combined DNA/RNA Molecule: Synthetic oligonucleotide
tcagtgaaaacacatccacccagcggtcgcgttttttgttgttttttgacgtgct

SEQ ID NO: 2498 - DNA, 49 bp, Artificial Sequence
  Description of Artificial Sequence: Synthetic oligonucleotide
gtgtcgtttgttttcgtagcgttcgtcgtctggtgagcagggatgagca

SEQ ID NO: 2499 - DNA, 34 bp, Artificial Sequence
  Description of Artificial Sequence: Synthetic probe
aattttgacgtgtcgtttgttttcgtagcgttcg

SEQ ID NO: 2500 - DNA, 22 bp, Artificial Sequence
  Description of Artificial Sequence: Synthetic primer
tcagtgaaaacacatccaccca

SEQ ID NO: 2501 - DNA, 19 bp, Artificial Sequence
  Description of Artificial Sequence: Synthetic primer
tgctcatccctgctcacca

SEQ ID NO: 2502 - DNA, 44 bp, Artificial Sequence
  Description of Artificial Sequence: Synthetic primer
  Description of Combined DNA/RNA Molecule: Synthetic primer
tgctcatccctgctcaccacgaacctacgcacgacgatgacgag

SEQ ID NO: 2503 - DNA, 27 bp, Artificial Sequence
  Description of Artificial Sequence: Synthetic primer
  Description of Combined DNA/RNA Molecule: Synthetic primer
ggtttgtttttagttggcggtcggttc

SEQ ID NO: 2504 - DNA, 34 bp, Artificial Sequence
  Description of Artificial Sequence: Synthetic primer
  Description of Combined DNA/RNA Molecule: Synthetic primer
ggtgtcgtggaacgacgaaaacaccgaaaaaaag

SEQ ID NO: 2505 - DNA, 53 bp, Artificial Sequence
  Description of Artificial Sequence: Synthetic oligonucleotide
  Description of Combined DNA/RNA Molecule: Synthetic oligonucleotide
tcgtagactcgctatcgccaggcggtcggtttttaagggatatttctcgatct

SEQ ID NO: 2506 - DNA, 52 bp, Artificial Sequence
  Description of Artificial Sequence: Synthetic oligonucleotide
gattcggagtacgcggttttggagtattagttctggtgagcagggatgagca

SEQ ID NO: 2507 - DNA, 31 bp, Artificial Sequence
  Description of Artificial Sequence: Synthetic probe
ccatttctcgattcggagtacgcggttttgg

SEQ ID NO: 2508 - DNA, 20 bp, Artificial Sequence
  Description of Artificial Sequence: Synthetic primer
tcgtagactcgctatcgcca

SEQ ID NO: 2509 - DNA, 19 bp, Artificial Sequence
  Description of Artificial Sequence: Synthetic primer
tgctcatccctgctcacca

SEQ ID NO: 2510 - DNA, 55 bp, Artificial Sequence
  Description of Artificial Sequence: Synthetic primer
  Description of Combined DNA/RNA Molecule: Synthetic primer
tgctcatccctgctcaccacaccgaaaaaaaacaaataaaaaaacacgtgaactg

SEQ ID NO: 2511 - DNA, 27 bp, Artificial Sequence
  Description of Artificial Sequence: Synthetic primer
  Description of Combined DNA/RNA Molecule: Synthetic primer
ggtgaggcgtttgtatttgtacgaggc

SEQ ID NO: 2512 - DNA, 38 bp, Artificial Sequence
  Description of Artificial Sequence: Synthetic primer
  Description of Combined DNA/RNA Molecule: Synthetic primer
ggtgtcgtggcgcgtacaactactatatcccgauaatg

SEQ ID NO: 2513 - DNA, 53 bp, Artificial Sequence
  Description of Artificial Sequence: Synthetic oligonucleotide
  Description of Combined DNA/RNA Molecule: Synthetic oligonucleotide
ttgcacccgcgacataaccgcgtttgtatttgtacgaggttattaagcgtacc

SEQ ID NO: 2514 - DNA, 41 bp, Artificial Sequence
  Description of Artificial Sequence: Synthetic oligonucleotide
gtattttgcgcgcgcgcggggtaattcactcgaacggagca

SEQ ID NO: 2515 - DNA, 26 bp, Artificial Sequence
  Description of Artificial Sequence: Synthetic probe
ccattaagcgtattttgcgcgcgcgc

SEQ ID NO: 2516 - DNA, 19 bp, Artificial Sequence
  Description of Artificial Sequence: Synthetic primer
ttgcacccgcgacataacc

SEQ ID NO: 2517 - DNA, 22 bp, Artificial Sequence
  Description of Artificial Sequence: Synthetic primer
tgctccgttcgagtgaattacc

SEQ ID NO: 2518 - DNA, 60 bp, Artificial Sequence
  Description of Artificial Sequence: Synthetic primer
  Description of Combined DNA/RNA Molecule: Synthetic primer
tgctccgttcgagtgaattacccgcgtacaactactatatcccgataataaaatgccgca

SEQ ID NO: 2519 - DNA, 25 bp, Artificial Sequence
  Description of Artificial Sequence: Synthetic primer
  Description of Combined DNA/RNA Molecule: Synthetic primer
cgtttgtgggttggtagttcggaac

SEQ ID NO: 2520 - DNA, 30 bp, Artificial Sequence
  Description of Artificial Sequence: Synthetic primer
  Description of Combined DNA/RNA Molecule: Synthetic primer
ggtgtcgtggctccgctaccgcgtcctccg

SEQ ID NO: 2521 - DNA, 55 bp, Artificial Sequence
  Description of Artificial Sequence: Synthetic oligonucleotide
  Description of Combined DNA/RNA Molecule: Synthetic oligonucleotide
tccggcctttgacgatacccggaatatattttttagaggttttcgcgatcgacac

SEQ ID NO: 2522 - DNA, 55 bp, Artificial Sequence
  Description of Artificial Sequence: Synthetic oligonucleotide
gacgtgtttcgcgtaggaacgtagtcgtttttcggtaattcactcgaacggagca

SEQ ID NO: 2523 - DNA, 26 bp, Artificial Sequence
  Description of Artificial Sequence: Synthetic probe
aacgcgatcgacgtgtttcgcgtagg

SEQ ID NO: 2524 - DNA, 19 bp, Artificial Sequence
  Description of Artificial Sequence: Synthetic primer
tccggcctttgacgatacc

SEQ ID NO: 2525 - DNA, 22 bp, Artificial Sequence
  Description of Artificial Sequence: Synthetic primer
tgctccgttcgagtgaattacc

SEQ ID NO: 2526 - DNA, 53 bp, Artificial Sequence
  Description of Artificial Sequence: Synthetic primer
  Description of Combined DNA/RNA Molecule: Synthetic primer
tgctccgttcgagtgaattacccgtcctccaatcgaaaaacgactatgutccc

SEQ ID NO: 2527 - DNA, 30 bp, Artificial Sequence
  Description of Artificial Sequence: Synthetic primer
  Description of Combined DNA/RNA Molecule: Synthetic primer
gtttagcgagtttgttttttagagcgattc

SEQ ID NO: 2528 - DNA, 33 bp, Artificial Sequence
  Description of Artificial Sequence: Synthetic primer
  Description of Combined DNA/RNA Molecule: Synthetic primer
ggtgtcgtggaaatccccaacccgcaaaatcct

SEQ ID NO: 2529 - DNA, 58 bp, Artificial Sequence
  Description of Artificial Sequence: Synthetic oligonucleotide
  Description of Combined DNA/RNA Molecule: Synthetic oligonucleotide
tccggcctttgacgatacccgagtttgttttttagagcgatttggattaactcgttcc

SEQ ID NO: 2530 - DNA, 67 bp, Artificial Sequence
  Description of Artificial Sequence: Synthetic oligonucleotide
gttttttaatagttggtgaggttttgttttattcgtttcgatttcggtaattcactcgaacggagca

SEQ ID NO: 2531 - DNA, 45 bp, Artificial Sequence
  Description of Artificial Sequence: Synthetic probe
ttttaactcgttttttaatagttggtgaggttttgttttattcgt

SEQ ID NO: 2532 - DNA, 19 bp, Artificial Sequence
  Description of Artificial Sequence: Synthetic primer
tccggcctttgacgatacc

SEQ ID NO: 2533 - DNA, 22 bp, Artificial Sequence
  Description of Artificial Sequence: Synthetic primer
tgctccgttcgagtgaattacc

SEQ ID NO: 2534 - DNA, 50 bp, Artificial Sequence
  Description of Artificial Sequence: Synthetic primer
  Description of Combined DNA/RNA Molecule: Synthetic primer
tgctccgttcgagtgaattacccaacccgcaaaatcccgaaattgaaaca

SEQ ID NO: 2535 - DNA, 36 bp, Artificial Sequence
  Description of Artificial Sequence: Synthetic primer
  Description of Combined DNA/RNA Molecule: Synthetic primer
gaggtagatatttttatatagtcgggatttcgagaa

SEQ ID NO: 2536 - DNA, 41 bp, Artificial Sequence
  Description of Artificial Sequence: Synthetic primer
  Description of Combined DNA/RNA Molecule: Synthetic primer
ggtgtcgtggtcctttaataaataaaccgaatccgccgaac

SEQ ID NO: 2537 - DNA, 60 bp, Artificial Sequence
  Description of Artificial Sequence: Synthetic oligonucleotide
  Description of Combined DNA/RNA Molecule: Synthetic oligonucleotide
tcgcggaaagtcccagtaacgatatttttatatagtcgggatttcgagagtaatcgtgaa

SEQ ID NO: 2538 - DNA, 41 bp, Artificial Sequence
  Description of Artificial Sequence: Synthetic oligonucleotide
gtgggcgatttgggagtcggggttggcctgtaagcgttcca

SEQ ID NO: 2539 - DNA, 27 bp, Artificial Sequence
  Description of Artificial Sequence: Synthetic probe
ttagtaatcgtgggcgatttgggagtc

SEQ ID NO: 2540 - DNA, 20 bp, Artificial Sequence
  Description of Artificial Sequence: Synthetic primer
tcgcggaaagtcccagtaac

SEQ ID NO: 2541 - DNA, 20 bp, Artificial Sequence
  Description of Artificial Sequence: Synthetic primer
tggaacgcttacaggccaac

SEQ ID NO: 2542 - DNA, 53 bp, Artificial Sequence
  Description of Artificial Sequence: Synthetic primer
  Description of Combined DNA/RNA Molecule: Synthetic primer
tggaacgcttacaggccaactcctttaataaataaaccgaatccgctgaatct

SEQ ID NO: 2543 - DNA, 34 bp, Artificial Sequence
  Description of Artificial Sequence: Synthetic primer
  Description of Combined DNA/RNA Molecule: Synthetic primer
cgtttttttaggtttattagttgtagttcggtgg

SEQ ID NO: 2544 - DNA, 37 bp, Artificial Sequence
  Description of Artificial Sequence: Synthetic primer
  Description of Combined DNA/RNA Molecule: Synthetic primer
ggtgtcgtggtacaactccgcgaaaaactaaaaacgg

SEQ ID NO: 2545 - DNA, 59 bp, Artificial Sequence
  Description of Artificial Sequence: Synthetic oligonucleotide
  Description of Combined DNA/RNA Molecule: Synthetic oligonucleotide
tgaacgctcaaacacgtgaacggtttattagttgtagttcggtgaatatagcgcggtcc

SEQ ID NO: 2546 - DNA, 54 bp, Artificial Sequence
  Description of Artificial Sequence: Synthetic oligonucleotide
ggtttcgacgtttttttttggttttggtgtttgggttggcctgtaagcgttcca

SEQ ID NO: 2547 - DNA, 35 bp, Artificial Sequence
  Description of Artificial Sequence: Synthetic probe
ccatagcgcggtttcgacgtttttttttggttttg

SEQ ID NO: 2548 - DNA, 21 bp, Artificial Sequence
  Description of Artificial Sequence: Synthetic primer
tgaacgctcaaacacgtgaac

SEQ ID NO: 2549 - DNA, 20 bp, Artificial Sequence
  Description of Artificial Sequence: Synthetic primer
tggaacgcttacaggccaac

SEQ ID NO: 2550 - DNA, 51 bp, Artificial Sequence
  Description of Artificial Sequence: Synthetic primer
  Description of Combined DNA/RNA Molecule: Synthetic primer
tggaacgcttacaggccaactacaactccgcgaaaaactaaaaatgacaag

SEQ ID NO: 2551 - DNA, 31 bp, Artificial Sequence
  Description of Artificial Sequence: Synthetic primer
  Description of Combined DNA/RNA Molecule: Synthetic primer
gtttattattaaagagaagcgtcggcgtatc

SEQ ID NO: 2552 - DNA, 36 bp, Artificial Sequence
  Description of Artificial Sequence: Synthetic primer
  Description of Combined DNA/RNA Molecule: Synthetic primer
ggtgtcgtggaccttcttctctttaacccgccgatc

SEQ ID NO: 2553 - DNA, 55 bp, Artificial Sequence
  Description of Artificial Sequence: Synthetic oligonucleotide
  Description of Combined DNA/RNA Molecule: Synthetic oligonucleotide
tacacgtggatatctccgaccgagaagcgtcggcgtattttcgttatcacgaacc

SEQ ID NO: 2554 - DNA, 63 bp, Artificial Sequence
  Description of Artificial Sequence: Synthetic oligonucleotide
gaatttttttgagcgttaggtaattatttggttttagaatcgggtgctagtcacacagttcca

SEQ ID NO: 2555 - DNA, 45 bp, Artificial Sequence
  Description of Artificial Sequence: Synthetic probe
ttttatcacgaatttttttgagcgttaggtaattatttggtttta

SEQ ID NO: 2556 - DNA, 21 bp, Artificial Sequence
  Description of Artificial Sequence: Synthetic primer
tacacgtggatatctccgacc

SEQ ID NO: 2557 - DNA, 21 bp, Artificial Sequence
  Description of Artificial Sequence: Synthetic primer
tggaactgtgtgactagcacc

SEQ ID NO: 2558 - DNA, 49 bp, Artificial Sequence
  Description of Artificial Sequence: Synthetic primer
  Description of Combined DNA/RNA Molecule: Synthetic primer
tggaactgtgtgactagcaccaccttcttctctttaacccgctgattcc

SEQ ID NO: 2559 - DNA, 22 bp, Artificial Sequence
  Description of Artificial Sequence: Synthetic primer
  Description of Combined DNA/RNA Molecule: Synthetic primer
gtttttttggcgtgcgcgttgg

SEQ ID NO: 2560 - DNA, 32 bp, Artificial Sequence
  Description of Artificial Sequence: Synthetic primer
  Description of Combined DNA/RNA Molecule: Synthetic primer
ggtgtcgtggcgccatcgaacgacgacaaaag

SEQ ID NO: 2561 - DNA, 41 bp, Artificial Sequence
  Description of Artificial Sequence: Synthetic oligonucleotide
  Description of Combined DNA/RNA Molecule: Synthetic oligonucleotide
tagcattcgagaacgcaccgcgtgcgcgttgacatcggcac

SEQ ID NO: 2562 - DNA, 42 bp, Artificial Sequence
  Description of Artificial Sequence: Synthetic oligonucleotide
ggcgtcggcggcgatgagtagggtgctagtcacacagttcca

SEQ ID NO: 2563 - DNA, 20 bp, Artificial Sequence
  Description of Artificial Sequence: Synthetic probe
aatgacatcggcgtcggcgg

SEQ ID NO: 2564 - DNA, 19 bp, Artificial Sequence
  Description of Artificial Sequence: Synthetic primer
tagcattcgagaacgcacc

SEQ ID NO: 2565 - DNA, 21 bp, Artificial Sequence
  Description of Artificial Sequence: Synthetic primer
tggaactgtgtgactagcacc

SEQ ID NO: 2566 - DNA, 54 bp, Artificial Sequence
  Description of Artificial Sequence: Synthetic primer
  Description of Combined DNA/RNA Molecule: Synthetic primer
tggaactgtgtgactagcacccaaaaaaacatcgcaaccctactcattgccgct

SEQ ID NO: 2567 - DNA, 22 bp, Artificial Sequence
  Description of Artificial Sequence: Synthetic primer
  Description of Combined DNA/RNA Molecule: Synthetic primer
cgtcggtcgtagcgttcgggtc

SEQ ID NO: 2568 - DNA, 38 bp, Artificial Sequence
  Description of Artificial Sequence: Synthetic primer
  Description of Combined DNA/RNA Molecule: Synthetic primer
ggtgtcgtggaacgctaacgaacaaaaaaacgaacgag

SEQ ID NO: 2569 - DNA, 51 bp, Artificial Sequence
  Description of Artificial Sequence: Synthetic oligonucleotide
  Description of Combined DNA/RNA Molecule: Synthetic oligonucleotide
taaccgggcctaaagtgacagtcgtagcgttcgggtttttattggcgttgg

SEQ ID NO: 2570 - DNA, 58 bp, Artificial Sequence
  Description of Artificial Sequence: Synthetic oligonucleotide
gttaattttgaaggtacgtttttcgttcgggtttgttgttacgtgatctccctctcca

SEQ ID NO: 2571 - DNA, 38 bp, Artificial Sequence
  Description of Artificial Sequence: Synthetic probe
aatattggcgttaattttgaaggtacgtttttcgttcg

SEQ ID NO: 2572 - DNA, 20 bp, Artificial Sequence
  Description of Artificial Sequence: Synthetic primer
taaccgggcctaaagtgaca

SEQ ID NO: 2573 - DNA, 22 bp, Artificial Sequence
  Description of Artificial Sequence: Synthetic primer
tggagagggagatcacgtaaca

SEQ ID NO: 2574 - DNA, 53 bp, Artificial Sequence
  Description of Artificial Sequence: Synthetic primer
  Description of Combined DNA/RNA Molecule: Synthetic primer
tggagagggagatcacgtaacaaacgctaacgaacaaaaaaacgaatgaacag

SEQ ID NO: 2575 - DNA, 23 bp, Artificial Sequence
  Description of Artificial Sequence: Synthetic primer
  Description of Combined DNA/RNA Molecule: Synthetic primer
cgaggtagataatggcgcggaga

SEQ ID NO: 2576 - DNA, 36 bp, Artificial Sequence
  Description of Artificial Sequence: Synthetic primer
  Description of Combined DNA/RNA Molecule: Synthetic primer
ggtgtcgtggacatcgaaataaacgaacgccccgca

SEQ ID NO: 2577 - DNA, 47 bp, Artificial Sequence
  Description of Artificial Sequence: Synthetic oligonucleotide
  Description of Combined DNA/RNA Molecule: Synthetic oligonucleotide
tcgatggtcaatgagcttcacaataatggcgcggaggagcgcggagc

SEQ ID NO: 2578 - DNA, 59 bp, Artificial Sequence
  Description of Artificial Sequence: Synthetic oligonucleotide
ggaatttgggattaaatttggcgttgtttttgtagggtgttacgtgatctccctctcca

SEQ ID NO: 2579 - DNA, 31 bp, Artificial Sequence
  Description of Artificial Sequence: Synthetic probe
ttggagcgcggaatttgggattaaatttggc

SEQ ID NO: 2580 - DNA, 22 bp, Artificial Sequence
  Description of Artificial Sequence: Synthetic primer
tcgatggtcaatgagcttcaca

SEQ ID NO: 2581 - DNA, 22 bp, Artificial Sequence
  Description of Artificial Sequence: Synthetic primer
tggagagggagatcacgtaaca

SEQ ID NO: 2582 - DNA, 48 bp, Artificial Sequence
  Description of Artificial Sequence: Synthetic primer
  Description of Combined DNA/RNA Molecule: Synthetic primer
tggagagggagatcacgtaacagaaataaacgaacgccccgtgccctg

SEQ ID NO: 2583 - DNA, 27 bp, Artificial Sequence
  Description of Artificial Sequence: Synthetic primer
  Description of Combined DNA/RNA Molecule: Synthetic primer
tgtgagttggtgtgtttaggtcgggtc

SEQ ID NO: 2584 - DNA, 42 bp, Artificial Sequence
  Description of Artificial Sequence: Synthetic primer
  Description of Combined DNA/RNA Molecule: Synthetic primer
ggtgtcgtggtttacaacgccttaaaatataaacgttuccct

SEQ ID NO: 2585 - DNA, 47 bp, Artificial Sequence
  Description of Artificial Sequence: Synthetic oligonucleotide
  Description of Combined DNA/RNA Molecule: Synthetic oligonucleotide
tcgatggtcaatgagcttcacaaggtcgggttgggttgacgcggacg

SEQ ID NO: 2586 - DNA, 50 bp, Artificial Sequence
  Description of Artificial Sequence: Synthetic oligonucleotide
ggatacgggaggtagtaggtattcggagtgttacgtgatctccctctcca

SEQ ID NO: 2587 - DNA, 33 bp, Artificial Sequence
  Description of Artificial Sequence: Synthetic probe
ttttgacgcggatacgggaggtagtaggtattc

SEQ ID NO: 2588 - DNA, 22 bp, Artificial Sequence
  Description of Artificial Sequence: Synthetic primer
tcgatggtcaatgagcttcaca

SEQ ID NO: 2589 - DNA, 22 bp, Artificial Sequence
  Description of Artificial Sequence: Synthetic primer
tggagagggagatcacgtaaca

SEQ ID NO: 2590 - DNA, 28 bp, Artificial Sequence
  Description of Artificial Sequence: Synthetic primer
  Description of Combined DNA/RNA Molecule: Synthetic primer
ttattttttggtaagtgtggcgcgggac

SEQ ID NO: 2591 - DNA, 33 bp, Artificial Sequence
  Description of Artificial Sequence: Synthetic primer
  Description of Combined DNA/RNA Molecule: Synthetic primer
ggtgtcgtgggaaacgacgcaactcgaaaccca

SEQ ID NO: 2592 - DNA, 41 bp, Artificial Sequence
  Description of Artificial Sequence: Synthetic oligonucleotide
  Description of Combined DNA/RNA Molecule: Synthetic oligonucleotide
tctcgggaccacaatacgaacggcgcgaggttgaacgttcc

SEQ ID NO: 2593 - DNA, 42 bp, Artificial Sequence
  Description of Artificial Sequence: Synthetic oligonucleotide
gtttttgtcggcgggtcgtcgggttacgctaagctggtgcca

SEQ ID NO: 2594 - DNA, 27 bp, Artificial Sequence
  Description of Artificial Sequence: Synthetic probe
ttgttgaacgtttttgtcggcgggtcg

SEQ ID NO: 2595 - DNA, 21 bp, Artificial Sequence
  Description of Artificial Sequence: Synthetic primer
tctcgggaccacaatacgaac

SEQ ID NO: 2596 - DNA, 20 bp, Artificial Sequence
  Description of Artificial Sequence: Synthetic primer
tggcaccagcttagcgtaac

SEQ ID NO: 2597 - DNA, 44 bp, Artificial Sequence
  Description of Artificial Sequence: Synthetic primer
  Description of Combined DNA/RNA Molecule: Synthetic primer
tggcaccagcttagcgtaaccgacgcaactcgaaacctgacgat

SEQ ID NO: 2598 - DNA, 34 bp, Artificial Sequence
  Description of Artificial Sequence: Synthetic primer
  Description of Combined DNA/RNA Molecule: Synthetic primer
cgttttagttttgttgtaattttgttttcgttaa

SEQ ID NO: 2599 - DNA, 35 bp, Artificial Sequence
  Description of Artificial Sequence: Synthetic primer
  Description of Combined DNA/RNA Molecule: Synthetic primer
ggtgtcgtggctccaaacgcgaaataacgcuaaag

SEQ ID NO: 2600 - DNA, 63 bp, Artificial Sequence
  Description of Artificial Sequence: Synthetic oligonucleotide
  Description of Combined DNA/RNA Molecule: Synthetic oligonucleotide
ttgctgtgcgcggtagaacgttgtaattttgttttcgttagatagattagttggagtcgttga

SEQ ID NO: 2601 - DNA, 60 bp, Artificial Sequence
  Description of Artificial Sequence: Synthetic oligonucleotide
gttagttttagtttggagtttcgttttacggagtatttttgttacgctaagctggtgcca

SEQ ID NO: 2602 - DNA, 39 bp, Artificial Sequence
  Description of Artificial Sequence: Synthetic probe
aatggagtcgttagttttagtttggagtttcgttttacg

SEQ ID NO: 2603 - DNA, 19 bp, Artificial Sequence
  Description of Artificial Sequence: Synthetic primer
ttgctgtgcgcggtagaac

SEQ ID NO: 2604 - DNA, 20 bp, Artificial Sequence
  Description of Artificial Sequence: Synthetic primer
tggcaccagcttagcgtaac

SEQ ID NO: 2605 - DNA, 26 bp, Artificial Sequence
  Description of Artificial Sequence: Synthetic primer
  Description of Combined DNA/RNA Molecule: Synthetic primer
tagtcggtagcggtagtagtcgtagc

SEQ ID NO: 2606 - DNA, 36 bp, Artificial Sequence
  Description of Artificial Sequence: Synthetic primer
  Description of Combined DNA/RNA Molecule: Synthetic primer
ggtgtcgtggacctaataccctaaccccgtacccag

SEQ ID NO: 2607 - DNA, 50 bp, Artificial Sequence
  Description of Artificial Sequence: Synthetic oligonucleotide
  Description of Combined DNA/RNA Molecule: Synthetic oligonucleotide
tctcgattacgctccgcacgtagcggtagtagtcgtagtagttgcggacc

SEQ ID NO: 2608 - DNA, 69 bp, Artificial Sequence
  Description of Artificial Sequence: Synthetic oligonucleotide
ggatttagagtaaacgttttgtgttttggagttagaattagttttttgtgtgtagcttagacatggcca

SEQ ID NO: 2609 - DNA, 44 bp, Artificial Sequence
  Description of Artificial Sequence: Synthetic probe
tttagttgcggatttagagtaaacgttttgtgttttggagttag

SEQ ID NO: 2610 - DNA, 19 bp, Artificial Sequence
  Description of Artificial Sequence: Synthetic primer
tctcgattacgctccgcac

SEQ ID NO: 2611 - DNA, 22 bp, Artificial Sequence
  Description of Artificial Sequence: Synthetic primer
tggccatgtctaagctacacac

SEQ ID NO: 2612 - DNA, 26 bp, Artificial Sequence
  Description of Artificial Sequence: Synthetic primer
  Description of Combined DNA/RNA Molecule: Synthetic primer
atttttttaggtttcgcgggcgtttc

SEQ ID NO: 2613 - DNA, 31 bp, Artificial Sequence
  Description of Artificial Sequence: Synthetic primer
  Description of Combined DNA/RNA Molecule: Synthetic primer
ggtgtcgtgggcccgccttcccaaacuaaag

SEQ ID NO: 2614 - DNA, 48 bp, Artificial Sequence
  Description of Artificial Sequence: Synthetic oligonucleotide
  Description of Combined DNA/RNA Molecule: Synthetic oligonucleotide
tcacagagacttgccgatcacgcgttttttgggtgggttttgcggtcc

SEQ ID NO: 2615 - DNA, 56 bp, Artificial Sequence
  Description of Artificial Sequence: Synthetic oligonucleotide
ggtttttttaattttgtttagcgtgtgtgcgcgggtgtgtagcttagacatggcca

SEQ ID NO: 2616 - DNA, 38 bp, Artificial Sequence
  Description of Artificial Sequence: Synthetic probe
ttgttttgcggtttttttaattttgtttagcgtgtgtg

SEQ ID NO: 2617 - DNA, 21 bp, Artificial Sequence
  Description of Artificial Sequence: Synthetic primer
tcacagagacttgccgatcac

SEQ ID NO: 2618 - DNA, 22 bp, Artificial Sequence
  Description of Artificial Sequence: Synthetic primer
tggccatgtctaagctacacac

SEQ ID NO: 2619 - DNA, 60 bp, Artificial Sequence
  Description of Artificial Sequence: Synthetic primer
  Description of Combined DNA/RNA Molecule: Synthetic primer
tggccatgtctaagctacacactcccaaactaaaaaaaaaaataactaaaccgtgcacat

SEQ ID NO: 2620 - DNA, 33 bp, Artificial Sequence
  Description of Artificial Sequence: Synthetic primer
  Description of Combined DNA/RNA Molecule: Synthetic primer
gttcggaatatattttttagaggttttcgcggc

SEQ ID NO: 2621 - DNA, 37 bp, Artificial Sequence
  Description of Artificial Sequence: Synthetic primer
  Description of Combined DNA/RNA Molecule: Synthetic primer
ggtgtcgtggctcgctttaaacaactccgctaccgca

SEQ ID NO: 2622 - DNA, 53 bp, Artificial Sequence
  Description of Artificial Sequence: Synthetic oligonucleotide
  Description of Combined DNA/RNA Molecule: Synthetic oligonucleotide
tcacagagacttgccgatcactattttttagaggttttcgcggtcaacgtgcc

SEQ ID NO: 2623 - DNA, 53 bp, Artificial Sequence
  Description of Artificial Sequence: Synthetic oligonucleotide
gtgtttcgcgtaggaacgtagtcgtttttcggtgtgtagcttagacatggcca

SEQ ID NO: 2624 - DNA, 30 bp, Artificial Sequence
  Description of Artificial Sequence: Synthetic probe
ttggtcaacgtgtttcgcgtaggaacgtag

SEQ ID NO: 2625 - DNA, 21 bp, Artificial Sequence
  Description of Artificial Sequence: Synthetic primer
tcacagagacttgccgatcac

SEQ ID NO: 2626 - DNA, 22 bp, Artificial Sequence
  Description of Artificial Sequence: Synthetic primer
tggccatgtctaagctacacac

SEQ ID NO: 2627 - DNA, 49 bp, Artificial Sequence
  Description of Artificial Sequence: Synthetic primer
  Description of Combined DNA/RNA Molecule: Synthetic primer
tggccatgtctaagctacacaccgcgtcctccaatcgaaaaatgactat

SEQ ID NO: 2628 - DNA, 29 bp, Artificial Sequence
  Description of Artificial Sequence: Synthetic primer
  Description of Combined DNA/RNA Molecule: Synthetic primer
gtttttttaggagttcggaggatcgtagc

SEQ ID NO: 2629 - DNA, 32 bp, Artificial Sequence
  Description of Artificial Sequence: Synthetic primer
  Description of Combined DNA/RNA Molecule: Synthetic primer
ggtgtcgtggtacgatacccccgccaaatctg

SEQ ID NO: 2630 - DNA, 47 bp, Artificial Sequence
  Description of Artificial Sequence: Synthetic oligonucleotide
  Description of Combined DNA/RNA Molecule: Synthetic oligonucleotide
ttcgtccctgcacgctaacgatcgtagttttgtggtaggtgcgggct

SEQ ID NO: 2631 - DNA, 44 bp, Artificial Sequence
  Description of Artificial Sequence: Synthetic oligonucleotide
gggtcgtgtttcgtaggaggagcggttccatcaccgttaggcca

SEQ ID NO: 2632 - DNA, 28 bp, Artificial Sequence
  Description of Artificial Sequence: Synthetic probe
tttaggtgcgggtcgtgtttcgtaggag

SEQ ID NO: 2633 - DNA, 19 bp, Artificial Sequence
  Description of Artificial Sequence: Synthetic primer
ttcgtccctgcacgctaac

SEQ ID NO: 2634 - DNA, 20 bp, Artificial Sequence
  Description of Artificial Sequence: Synthetic primer
tggcctaacggtgatggaac

SEQ ID NO: 2635 - DNA, 47 bp, Artificial Sequence
  Description of Artificial Sequence: Synthetic primer
  Description of Combined DNA/RNA Molecule: Synthetic primer
tggcctaacggtgatggaacccaaatctaaaccgaacccgtgccccc

SEQ ID NO: 2636 - DNA, 37 bp, Artificial Sequence
  Description of Artificial Sequence: Synthetic primer
  Description of Combined DNA/RNA Molecule: Synthetic primer
ttagttattttatttaacgtcgtttttatttcgtttc

SEQ ID NO: 2637 - DNA, 33 bp, Artificial Sequence
  Description of Artificial Sequence: Synthetic primer
  Description of Combined DNA/RNA Molecule: Synthetic primer
ggtgtcgtggaataaacgcgccctacgcgccgt

SEQ ID NO: 2638 - DNA, 63 bp, Artificial Sequence
  Description of Artificial Sequence: Synthetic oligonucleotide
  Description of Combined DNA/RNA Molecule: Synthetic oligonucleotide
tgatgctggcaaaccctagaaccgtcgtttttatttcgttttcgttttaataatgctcggcag

SEQ ID NO: 2639 - DNA, 53 bp, Artificial Sequence
  Description of Artificial Sequence: Synthetic oligonucleotide
ggcgattttcggttttgcgttttatttttgcgggttccatcaccgttaggcca

SEQ ID NO: 2640 - DNA, 28 bp, Artificial Sequence
  Description of Artificial Sequence: Synthetic probe
ccaatgctcggcgattttcggttttgcg

SEQ ID NO: 2641 - DNA, 22 bp, Artificial Sequence
  Description of Artificial Sequence: Synthetic primer
tgatgctggcaaaccctagaac

SEQ ID NO: 2642 - DNA, 20 bp, Artificial Sequence
  Description of Artificial Sequence: Synthetic primer
tggcctaacggtgatggaac

SEQ ID NO: 2643 - DNA, 44 bp, Artificial Sequence
  Description of Artificial Sequence: Synthetic primer
  Description of Combined DNA/RNA Molecule: Synthetic primer
tggcctaacggtgatggaaccgctcgacttctaccgctgcaaag

SEQ ID NO: 2644 - DNA, 31 bp, Artificial Sequence
  Description of Artificial Sequence: Synthetic primer
  Description of Combined DNA/RNA Molecule: Synthetic primer
gaattttttttattaggtttcgcgtcgaggc

SEQ ID NO: 2645 - DNA, 40 bp, Artificial Sequence
  Description of Artificial Sequence: Synthetic primer
  Description of Combined DNA/RNA Molecule: Synthetic primer
ggtgtcgtggaataaccgaaatacaaaaacgtacauaacc

SEQ ID NO: 2646 - DNA, 47 bp, Artificial Sequence
  Description of Artificial Sequence: Synthetic oligonucleotide
  Description of Combined DNA/RNA Molecule: Synthetic oligonucleotide
tgatgctggcaaaccctagaacgcgtcgaggttttacggagcgttgg

SEQ ID NO: 2647 - DNA, 62 bp, Artificial Sequence
  Description of Artificial Sequence: Synthetic oligonucleotide
gttaatacgtacgcgtattttgtgttttaggtagttcgttttgttccatcaccgttaggcca

SEQ ID NO: 2648 - DNA, 39 bp, Artificial Sequence
  Description of Artificial Sequence: Synthetic probe
aaacggagcgttaatacgtacgcgtattttgtgttttag

SEQ ID NO: 2649 - DNA, 22 bp, Artificial Sequence
  Description of Artificial Sequence: Synthetic primer
tgatgctggcaaaccctagaac

SEQ ID NO: 2650 - DNA, 20 bp, Artificial Sequence
  Description of Artificial Sequence: Synthetic primer
tggcctaacggtgatggaac

SEQ ID NO: 2651 - DNA, 58 bp, Artificial Sequence
  Description of Artificial Sequence: Synthetic primer
  Description of Combined DNA/RNA Molecule: Synthetic primer
tggcctaacggtgatggaacccgaaatacaaaaacgtacataactaaaaaatgaactg

SEQ ID NO: 2652 - DNA, 27 bp, Artificial Sequence
  Description of Artificial Sequence: Synthetic primer
  Description of Combined DNA/RNA Molecule: Synthetic primer
gcgtttttaaaggtaggttcgcggttc

SEQ ID NO: 2653 - DNA, 36 bp, Artificial Sequence
  Description of Artificial Sequence: Synthetic primer
  Description of Combined DNA/RNA Molecule: Synthetic primer
ggtgtcgtgggatctaaccgcgcctctatacccgag

SEQ ID NO: 2654 - DNA, 56 bp, Artificial Sequence
  Description of Artificial Sequence: Synthetic oligonucleotide
  Description of Combined DNA/RNA Molecule: Synthetic oligonucleotide
ttttcggcatccgcttccacgtttttaaaggtaggttcgcggttttttcacgttcc

SEQ ID NO: 2655 - DNA, 65 bp, Artificial Sequence
  Description of Artificial Sequence: Synthetic oligonucleotide
gttttggcgttcggtttttcgtatttagtgtttttatagttgtgtggttaacagaggacaggcca

SEQ ID NO: 2656 - DNA, 39 bp, Artificial Sequence
  Description of Artificial Sequence: Synthetic probe
aattttcacgttttggcgttcggtttttcgtatttagtg

SEQ ID NO: 2657 - DNA, 19 bp, Artificial Sequence
  Description of Artificial Sequence: Synthetic primer
ttttcggcatccgcttcca

SEQ ID NO: 2658 - DNA, 21 bp, Artificial Sequence
  Description of Artificial Sequence: Synthetic primer
tggcctgtcctctgttaacca

SEQ ID NO: 2659 - DNA, 49 bp, Artificial Sequence
  Description of Artificial Sequence: Synthetic primer
  Description of Combined DNA/RNA Molecule: Synthetic primer
tggcctgtcctctgttaaccaatctaaccgcgcctctatacctgaacat

SEQ ID NO: 2660 - DNA, 25 bp, Artificial Sequence
  Description of Artificial Sequence: Synthetic primer
  Description of Combined DNA/RNA Molecule: Synthetic primer
cggtgaatttgaggttgttcgcggt

SEQ ID NO: 2661 - DNA, 35 bp, Artificial Sequence
  Description of Artificial Sequence: Synthetic primer
  Description of Combined DNA/RNA Molecule: Synthetic primer
ggtgtcgtggctaacgacctctaaccccgactcgg

SEQ ID NO: 2662 - DNA, 42 bp, Artificial Sequence
  Description of Artificial Sequence: Synthetic oligonucleotide
  Description of Combined DNA/RNA Molecule: Synthetic oligonucleotide
tccgggtatacactgtcccaggttgttcgcggcgcgcgggct

SEQ ID NO: 2663 - DNA, 37 bp, Artificial Sequence
  Description of Artificial Sequence: Synthetic oligonucleotide
gggtcggcgagcggcgtggttaacagaggacaggcca

SEQ ID NO: 2664 - DNA, 17 bp, Artificial Sequence
  Description of Artificial Sequence: Synthetic probe
ttggcgcgcgggtcggc

SEQ ID NO: 2665 - DNA, 20 bp, Artificial Sequence
  Description of Artificial Sequence: Synthetic primer
tccgggtatacactgtccca

SEQ ID NO: 2666 - DNA, 21 bp, Artificial Sequence
  Description of Artificial Sequence: Synthetic primer
tggcctgtcctctgttaacca

SEQ ID NO: 2667 - DNA, 48 bp, Artificial Sequence
  Description of Artificial Sequence: Synthetic primer
  Description of Combined DNA/RNA Molecule: Synthetic primer
tggcctgtcctctgttaaccacgactcgacgccgctaaaaatgctaag

SEQ ID NO: 2668 - DNA, 23 bp, Artificial Sequence
  Description of Artificial Sequence: Synthetic primer
  Description of Combined DNA/RNA Molecule: Synthetic primer
gggtcgaggtaggatttcgtttt

SEQ ID NO: 2669 - DNA, 34 bp, Artificial Sequence
  Description of Artificial Sequence: Synthetic primer
  Description of Combined DNA/RNA Molecule: Synthetic primer
ggtgtcgtggcaaaaccctaaccctcgcccctca

SEQ ID NO: 2670 - DNA, 48 bp, Artificial Sequence
  Description of Artificial Sequence: Synthetic oligonucleotide
  Description of Combined DNA/RNA Molecule: Synthetic oligonucleotide
tgcgactctattcacgtccaagtaggatttcgtttcgggaggcgtaaa

SEQ ID NO: 2671 - DNA, 43 bp, Artificial Sequence
  Description of Artificial Sequence: Synthetic oligonucleotide
gtaggtgcggcgtgaggatcgcttgctatttggtgtaccgcca

SEQ ID NO: 2672 - DNA, 20 bp, Artificial Sequence
  Description of Artificial Sequence: Synthetic probe
aagggaggcgtaggtgcggc

SEQ ID NO: 2673 - DNA, 21 bp, Artificial Sequence
  Description of Artificial Sequence: Synthetic primer
tgcgactctattcacgtccaa

SEQ ID NO: 2674 - DNA, 21 bp, Artificial Sequence
  Description of Artificial Sequence: Synthetic primer
tggcggtacaccaaatagcaa

SEQ ID NO: 2675 - DNA, 46 bp, Artificial Sequence
  Description of Artificial Sequence: Synthetic primer
  Description of Combined DNA/RNA Molecule: Synthetic primer
tggcggtacaccaaatagcaaccctccctcctcaaaacgtgatccc

SEQ ID NO: 2676 - DNA, 24 bp, Artificial Sequence
  Description of Artificial Sequence: Synthetic primer
  Description of Combined DNA/RNA Molecule: Synthetic primer
ggcgaaggtagtttcggacgcggg

SEQ ID NO: 2677 - DNA, 30 bp, Artificial Sequence
  Description of Artificial Sequence: Synthetic primer
  Description of Combined DNA/RNA Molecule: Synthetic primer
ggtgtcgtggccgcgacgacaacgccagct

SEQ ID NO: 2678 - DNA, 43 bp, Artificial Sequence
  Description of Artificial Sequence: Synthetic oligonucleotide
  Description of Combined DNA/RNA Molecule: Synthetic oligonucleotide
ttgtgcagagcgaacaacaagtttcggacgcggagagcgagaa

SEQ ID NO: 2679 - DNA, 41 bp, Artificial Sequence
  Description of Artificial Sequence: Synthetic oligonucleotide
gaggagcggttgttcgcggtttgctatttggtgtaccgcca

SEQ ID NO: 2680 - DNA, 24 bp, Artificial Sequence
  Description of Artificial Sequence: Synthetic probe
ttggagagcgaggagcggttgttc

SEQ ID NO: 2681 - DNA, 20 bp, Artificial Sequence
  Description of Artificial Sequence: Synthetic primer
ttgtgcagagcgaacaacaa

SEQ ID NO: 2682 - DNA, 21 bp, Artificial Sequence
  Description of Artificial Sequence: Synthetic primer
tggcggtacaccaaatagcaa

SEQ ID NO: 2683 - DNA, 45 bp, Artificial Sequence
  Description of Artificial Sequence: Synthetic primer
  Description of Combined DNA/RNA Molecule: Synthetic primer
tggcggtacaccaaatagcaaacaacgccatcccgaactgcgaat

SEQ ID NO: 2684 - DNA, 29 bp, Artificial Sequence
  Description of Artificial Sequence: Synthetic primer
  Description of Combined DNA/RNA Molecule: Synthetic primer
ggtagggagtcgtatttaggtttcgggcc

SEQ ID NO: 2685 - DNA, 43 bp, Artificial Sequence
  Description of Artificial Sequence: Synthetic primer
  Description of Combined DNA/RNA Molecule: Synthetic primer
ggtgtcgtggcgaaaaaaaaaaaattctaacttcgaacccgcg

SEQ ID NO: 2686 - DNA, 44 bp, Artificial Sequence
  Description of Artificial Sequence: Synthetic oligonucleotide
  Description of Combined DNA/RNA Molecule: Synthetic oligonucleotide
tccaaacgattaggagcgtcaacggacgagggacggctcgagca

SEQ ID NO: 2687 - DNA, 47 bp, Artificial Sequence
  Description of Artificial Sequence: Synthetic oligonucleotide
gagtgaggcgtttttcgaaggttgcgttggacagaggtatacgccca

SEQ ID NO: 2688 - DNA, 26 bp, Artificial Sequence
  Description of Artificial Sequence: Synthetic probe
ttacggctcgagtgaggcgtttttcg

SEQ ID NO: 2689 - DNA, 22 bp, Artificial Sequence
  Description of Artificial Sequence: Synthetic primer
tccaaacgattaggagcgtcaa

SEQ ID NO: 2690 - DNA, 21 bp, Artificial Sequence
  Description of Artificial Sequence: Synthetic primer
tgggcgtatacctctgtccaa

SEQ ID NO: 2691 - DNA, 57 bp, Artificial Sequence
  Description of Artificial Sequence: Synthetic primer
  Description of Combined DNA/RNA Molecule: Synthetic primer
tgggcgtatacctctgtccaacgaaaaaaaaaaaattctaacttcgaacctgcaact

SEQ ID NO: 2692 - DNA, 29 bp, Artificial Sequence
  Description of Artificial Sequence: Synthetic primer
  Description of Combined DNA/RNA Molecule: Synthetic primer
ggagatgtagatttcgatgttttcggcgc

SEQ ID NO: 2693 - DNA, 31 bp, Artificial Sequence; identical to SEQ ID NO: 791
  Description of Artificial Sequence: Synthetic primer
  Description of Combined DNA/RNA Molecule: Synthetic primer

SEQ ID NO: 2694 - DNA, 48 bp, Artificial Sequence; identical to SEQ ID NO: 792
  Description of Artificial Sequence: Synthetic oligonucleotide
  Description of Combined DNA/RNA Molecule: Synthetic oligonucleotide

SEQ ID NO: 2695 - DNA, 38 bp, Artificial Sequence; identical to SEQ ID NO: 793
  Description of Artificial Sequence: Synthetic oligonucleotide

SEQ ID NO: 2696 - DNA, 22 bp, Artificial Sequence
  Description of Artificial Sequence: Synthetic probe
ccttttagcggacggacgcggc

SEQ ID NO: 2697 - DNA, 20 bp, Artificial Sequence
  Description of Artificial Sequence: Synthetic primer
tcccttagagagaacgccca

SEQ ID NO: 2698 - DNA, 22 bp, Artificial Sequence
  Description of Artificial Sequence: Synthetic primer
taagaacactcgtacgtcacca

SEQ ID NO: 2699 - DNA, 48 bp, Artificial Sequence; identical to SEQ ID NO: 797
  Description of Artificial Sequence: Synthetic primer
  Description of Combined DNA/RNA Molecule: Synthetic primer

SEQ ID NO: 2700 - DNA, 25 bp, Artificial Sequence
  Description of Artificial Sequence: Synthetic primer
  Description of Combined DNA/RNA Molecule: Synthetic primer
tcgggagggttcgattttacggatc

SEQ ID NO: 2701 - DNA, 32 bp, Artificial Sequence; identical to SEQ ID NO: 799
  Description of Artificial Sequence: Synthetic primer
  Description of Combined DNA/RNA Molecule: Synthetic primer

SEQ ID NO: 2702 - DNA, 54 bp, Artificial Sequence; identical to SEQ ID NO: 800
  Description of Artificial Sequence: Synthetic oligonucleotide
  Description of Combined DNA/RNA Molecule: Synthetic oligonucleotide

SEQ ID NO: 2703 - DNA, 59 bp, Artificial Sequence; identical to SEQ ID NO: 801
  Description of Artificial Sequence: Synthetic oligonucleotide

SEQ ID NO: 2704 - DNA, 39 bp, Artificial Sequence; identical to SEQ ID NO: 802
  Description of Artificial Sequence: Synthetic probe

SEQ ID NO: 2705 - DNA, 21 bp, Artificial Sequence
  Description of Artificial Sequence: Synthetic primer
tctcataccagacgcggtaac

SEQ ID NO: 2706 - DNA, 19 bp, Artificial Sequence
  Description of Artificial Sequence: Synthetic primer
taagcacagcgacacgaac

SEQ ID NO: 2707 - DNA, 42 bp, Artificial Sequence; identical to SEQ ID NO: 805
  Description of Artificial Sequence: Synthetic primer
  Description of Combined DNA/RNA Molecule: Synthetic primer

SEQ ID NO: 2708 - DNA, 21 bp, Artificial Sequence
  Description of Artificial Sequence: Synthetic primer
  Description of Combined DNA/RNA Molecule: Synthetic primer
agttgcgggtcgggtagtgac

SEQ ID NO: 2709 - DNA, 44 bp, Artificial Sequence; identical to SEQ ID NO: 807
  Description of Artificial Sequence: Synthetic primer
  Description of Combined DNA/RNA Molecule: Synthetic primer

SEQ ID NO: 2710 - DNA, 49 bp, Artificial Sequence; identical to SEQ ID NO: 808
  Description of Artificial Sequence: Synthetic oligonucleotide
  Description of Combined DNA/RNA Molecule: Synthetic oligonucleotide

SEQ ID NO: 2711 - DNA, 54 bp, Artificial Sequence; identical to SEQ ID NO: 809
  Description of Artificial Sequence: Synthetic oligonucleotide

SEQ ID NO: 2712 - DNA, 37 bp, Artificial Sequence; identical to SEQ ID NO: 810
  Description of Artificial Sequence: Synthetic probe

SEQ ID NO: 2713 - DNA, 19 bp, Artificial Sequence
  Description of Artificial Sequence: Synthetic primer
ttttcggcggcagctaaac

SEQ ID NO: 2714 - DNA, 19 bp, Artificial Sequence
  Description of Artificial Sequence: Synthetic primer
taagcacagcgacacgaac

SEQ ID NO: 2715 - DNA, 58 bp, Artificial Sequence; identical to SEQ ID NO: 813
  Description of Artificial Sequence: Synthetic primer
  Description of Combined DNA/RNA Molecule: Synthetic primer

SEQ ID NO: 2716 - DNA, 30 bp, Artificial Sequence; identical to SEQ ID NO: 814
  Description of Artificial Sequence: Synthetic primer
  Description of Combined DNA/RNA Molecule: Synthetic primer

SEQ ID NO: 2717 - DNA, 42 bp, Artificial Sequence; identical to SEQ ID NO: 815
  Description of Artificial Sequence: Synthetic primer
  Description of Combined DNA/RNA Molecule: Synthetic primer

SEQ ID NO: 2718 - DNA, 62 bp, Artificial Sequence; identical to SEQ ID NO: 816
  Description of Artificial Sequence: Synthetic oligonucleotide
  Description of Combined DNA/RNA Molecule: Synthetic oligonucleotide

SEQ ID NO: 2719 - DNA, 52 bp, Artificial Sequence; identical to SEQ ID NO: 817
  Description of Artificial Sequence: Synthetic oligonucleotide

SEQ ID NO: 2720 - DNA, 29 bp, Artificial Sequence
  Description of Artificial Sequence: Synthetic probe
ccttttctcgattttcggtgttgcggaag

SEQ ID NO: 2721 - DNA, 22 bp, Artificial Sequence
  Description of Artificial Sequence: Synthetic primer
tgatgctggcaaaccctagaac

SEQ ID NO: 2722 - DNA, 20 bp, Artificial Sequence
  Description of Artificial Sequence: Synthetic primer
tggcctaacggtgatggaac

SEQ ID NO: 2723 - DNA, 53 bp, Artificial Sequence; identical to SEQ ID NO: 821
  Description of Artificial Sequence: Synthetic primer
  Description of Combined DNA/RNA Molecule: Synthetic primer

SEQ ID NO: 2724 - DNA, 31 bp, Artificial Sequence; identical to SEQ ID NO: 822
  Description of Artificial Sequence: Synthetic primer
  Description of Combined DNA/RNA Molecule: Synthetic primer

SEQ ID NO: 2725 - DNA, 38 bp, Artificial Sequence; identical to SEQ ID NO: 823
  Description of Artificial Sequence: Synthetic primer
  Description of Combined DNA/RNA Molecule: Synthetic primer

SEQ ID NO: 2726 - DNA, 50 bp, Artificial Sequence; identical to SEQ ID NO: 824
  Description of Artificial Sequence: Synthetic oligonucleotide
  Description of Combined DNA/RNA Molecule: Synthetic oligonucleotide

SEQ ID NO: 2727 - DNA, 64 bp, Artificial Sequence; identical to SEQ ID NO: 825
  Description of Artificial Sequence: Synthetic oligonucleotide

SEQ ID NO: 2728 - DNA, 26 bp, Artificial Sequence
  Description of Artificial Sequence: Synthetic probe
aatgggcacgggcggatttttcgtta

SEQ ID NO: 2729 - DNA, 19 bp, Artificial Sequence
  Description of Artificial Sequence: Synthetic primer
ttagccgccaaacgtacca

SEQ ID NO: 2730 - DNA, 20 bp, Artificial Sequence
  Description of Artificial Sequence: Synthetic primer
tactatcgtgttcctgccca

SEQ ID NO: 2731 - DNA, 20 bp, Artificial Sequence
  Description of Artificial Sequence: Synthetic primer
  Description of Combined DNA/RNA Molecule: Synthetic primer
ggcgttttcgtcggcgggtg

SEQ ID NO: 2732 - DNA, 30 bp, Artificial Sequence; identical to SEQ ID NO: 830
  Description of Artificial Sequence: Synthetic primer
  Description of Combined DNA/RNA Molecule: Synthetic primer

SEQ ID NO: 2733 - DNA, 52 bp, Artificial Sequence; identical to SEQ ID NO: 831
  Description of Artificial Sequence: Synthetic oligonucleotide
  Description of Combined DNA/RNA Molecule: Synthetic oligonucleotide

SEQ ID NO: 2734 - DNA, 53 bp, Artificial Sequence; identical to SEQ ID NO: 832
  Description of Artificial Sequence: Synthetic oligonucleotide

SEQ ID NO: 2735 - DNA, 27 bp, Artificial Sequence
  Description of Artificial Sequence: Synthetic probe
aagaggctcgttttcgtttggtttgcg

SEQ ID NO: 2736 - DNA, 20 bp, Artificial Sequence
  Description of Artificial Sequence: Synthetic primer
tagcagctgaacaacccaac

SEQ ID NO: 2737 - DNA, 20 bp, Artificial Sequence
  Description of Artificial Sequence: Synthetic primer
tagcatgccgaccatacaac

SEQ ID NO: 2738 - DNA, 46 bp, Artificial Sequence; identical to SEQ ID NO: 836
  Description of Artificial Sequence: Synthetic primer
  Description of Combined DNA/RNA Molecule: Synthetic primer

SEQ ID NO: 2739 - DNA, 31 bp, Artificial Sequence; identical to SEQ ID NO: 837
  Description of Artificial Sequence: Synthetic primer
  Description of Combined DNA/RNA Molecule: Synthetic primer

SEQ ID NO: 2740 - DNA, 43 bp, Artificial Sequence; identical to SEQ ID NO: 838
  Description of Artificial Sequence: Synthetic primer
  Description of Combined DNA/RNA Molecule: Synthetic primer

SEQ ID NO: 2741 - DNA, 56 bp, Artificial Sequence; identical to SEQ ID NO: 839
  Description of Artificial Sequence: Synthetic oligonucleotide
  Description of Combined DNA/RNA Molecule: Synthetic oligonucleotide

SEQ ID NO: 2742 - DNA, 53 bp, Artificial Sequence; identical to SEQ ID NO: 840
  Description of Artificial Sequence: Synthetic oligonucleotide

SEQ ID NO: 2743 - DNA, 34 bp, Artificial Sequence; identical to SEQ ID NO: 841
  Description of Artificial Sequence: Synthetic probe

SEQ ID NO: 2744 - DNA, 19 bp, Artificial Sequence
  Description of Artificial Sequence: Synthetic primer
tctgcccttcgcttcgaac

SEQ ID NO: 2745 - DNA, 20 bp, Artificial Sequence
  Description of Artificial Sequence: Synthetic primer
tagcatgccgaccatacaac

SEQ ID NO: 2746 - DNA, 55 bp, Artificial Sequence; identical to SEQ ID NO: 844
  Description of Artificial Sequence: Synthetic primer
  Description of Combined DNA/RNA Molecule: Synthetic primer

SEQ ID NO: 2747 - DNA, 26 bp, Artificial Sequence
  Description of Artificial Sequence: Synthetic primer
  Description of Combined DNA/RNA Molecule: Synthetic primer
tttgttgttcgtcgttcgtacgtttg

SEQ ID NO: 2748 - DNA, 36 bp, Artificial Sequence; identical to SEQ ID NO: 1378
  Description of Artificial Sequence: Synthetic primer
  Description of Combined DNA/RNA Molecule: Synthetic primer

SEQ ID NO: 2749 - DNA, 46 bp, Artificial Sequence; identical to SEQ ID NO: 1379
  Description of Artificial Sequence: Synthetic oligonucleotide
  Description of Combined DNA/RNA Molecule: Synthetic oligonucleotide

SEQ ID NO: 2750 - DNA, 60 bp, Artificial Sequence; identical to SEQ ID NO: 1380
  Description of Artificial Sequence: Synthetic oligonucleotide

SEQ ID NO: 2751 - DNA, 33 bp, Artificial Sequence; identical to SEQ ID NO: 1381
  Description of Artificial Sequence: Synthetic probe

SEQ ID NO: 2752 - DNA, 19 bp, Artificial Sequence
  Description of Artificial Sequence: Synthetic primer
tccggcctttgacgatacc

SEQ ID NO: 2753 - DNA, 22 bp, Artificial Sequence
  Description of Artificial Sequence: Synthetic primer
tgctccgttcgagtgaattacc

SEQ ID NO: 2754 - DNA, 56 bp, Artificial Sequence; identical to SEQ ID NO: 1384
  Description of Artificial Sequence: Synthetic primer
  Description of Combined DNA/RNA Molecule: Synthetic primer

SEQ ID NO: 2755 - DNA, 36 bp, Artificial Sequence; identical to SEQ ID NO: 1385
  Description of Artificial Sequence: Synthetic primer
  Description of Combined DNA/RNA Molecule: Synthetic primer

SEQ ID NO: 2756 - DNA, 33 bp, Artificial Sequence; identical to SEQ ID NO: 1386
  Description of Artificial Sequence: Synthetic primer
  Description of Combined DNA/RNA Molecule: Synthetic primer

SEQ ID NO: 2757 - DNA, 59 bp, Artificial Sequence; identical to SEQ ID NO: 1387
  Description of Artificial Sequence: Synthetic oligonucleotide
  Description of Combined DNA/RNA Molecule: Synthetic oligonucleotide

SEQ ID NO: 2758 - DNA, 41 bp, Artificial Sequence; identical to SEQ ID NO: 1388
  Description of Artificial Sequence: Synthetic oligonucleotide

SEQ ID NO: 2759 - DNA, 22 bp, Artificial Sequence
  Description of Artificial Sequence: Synthetic probe
ttagacaacgaggaggagcggg

SEQ ID NO: 2760 - DNA, 19 bp, Artificial Sequence
  Description of Artificial Sequence: Synthetic primer
tccggcctttgacgatacc

SEQ ID NO: 2761 - DNA, 22 bp, Artificial Sequence
  Description of Artificial Sequence: Synthetic primer
tgctccgttcgagtgaattacc

SEQ ID NO: 2762 - DNA, 51 bp, Artificial Sequence; identical to SEQ ID NO: 1392
  Description of Artificial Sequence: Synthetic primer
  Description of Combined DNA/RNA Molecule: Synthetic primer

SEQ ID NO: 2763 - DNA, 24 bp, Artificial Sequence
  Description of Artificial Sequence: Synthetic primer
  Description of Combined DNA/RNA Molecule: Synthetic primer
gtcgtagtagggcgttgacgagtc

SEQ ID NO: 2764 - DNA, 38 bp, Artificial Sequence; identical to SEQ ID NO: 1441
  Description of Artificial Sequence: Synthetic primer
  Description of Combined DNA/RNA Molecule: Synthetic primer

SEQ ID NO: 2765 - DNA, 52 bp, Artificial Sequence; identical to SEQ ID NO: 1442
  Description of Artificial Sequence: Synthetic oligonucleotide
  Description of Combined DNA/RNA Molecule: Synthetic oligonucleotide

SEQ ID NO: 2766 - DNA, 56 bp, Artificial Sequence; identical to SEQ ID NO: 1443
  Description of Artificial Sequence: Synthetic oligonucleotide

SEQ ID NO: 2767 - DNA, 29 bp, Artificial Sequence
  Description of Artificial Sequence: Synthetic probe
aagagtctcgtcgttcgggtttaaggtcg

SEQ ID NO: 2768 - DNA, 22 bp, Artificial Sequence
  Description of Artificial Sequence: Synthetic primer
tcgatggtcaatgagcttcaca

SEQ ID NO: 2769 - DNA, 22 bp, Artificial Sequence
  Description of Artificial Sequence: Synthetic primer
tggagagggagatcacgtaaca

SEQ ID NO: 2770 - DNA, 58 bp, Artificial Sequence; identical to SEQ ID NO: 1447
  Description of Artificial Sequence: Synthetic primer
  Description of Combined DNA/RNA Molecule: Synthetic primer

SEQ ID NO: 2771 - DNA, 35 bp, Artificial Sequence; identical to SEQ ID NO: 1464
  Description of Artificial Sequence: Synthetic primer
  Description of Combined DNA/RNA Molecule: Synthetic primer

SEQ ID NO: 2772 - DNA, 38 bp, Artificial Sequence; identical to SEQ ID NO: 1465
  Description of Artificial Sequence: Synthetic primer
  Description of Combined DNA/RNA Molecule: Synthetic primer

SEQ ID NO: 2773 - DNA, 46 bp, Artificial Sequence; identical to SEQ ID NO: 1466
  Description of Artificial Sequence: Synthetic oligonucleotide
  Description of Combined DNA/RNA Molecule: Synthetic oligonucleotide

SEQ ID NO: 2774 - DNA, 63 bp, Artificial Sequence; identical to SEQ ID NO: 1467
  Description of Artificial Sequence: Synthetic oligonucleotide

SEQ ID NO: 2775 - DNA, 26 bp, Artificial Sequence
  Description of Artificial Sequence: Synthetic probe
aatgggcgcgtcggttcggttattag

SEQ ID NO: 2776 - DNA, 19 bp, Artificial Sequence
  Description of Artificial Sequence: Synthetic primer
tctcgattacgctccgcac

SEQ ID NO: 2777 - DNA, 22 bp, Artificial Sequence
  Description of Artificial Sequence: Synthetic primer
tggccatgtctaagctacacac

SEQ ID NO: 2778 - DNA, 55 bp, Artificial Sequence; identical to SEQ ID NO: 1471
  Description of Artificial Sequence: Synthetic primer
  Description of Combined DNA/RNA Molecule: Synthetic primer

SEQ ID NO: 2779 - DNA, 22 bp, Artificial Sequence
  Description of Artificial Sequence: Synthetic primer
  Description of Combined DNA/RNA Molecule: Synthetic primer
ggatatggtgcggtggcggtaa

SEQ ID NO: 2780 - DNA, 33 bp, Artificial Sequence; identical to SEQ ID NO: 1473
  Description of Artificial Sequence: Synthetic primer
  Description of Combined DNA/RNA Molecule: Synthetic primer

SEQ ID NO: 2781 - DNA, 48 bp, Artificial Sequence; identical to SEQ ID NO: 1474
  Description of Artificial Sequence: Synthetic oligonucleotide
  Description of Combined DNA/RNA Molecule: Synthetic oligonucleotide

SEQ ID NO: 2782 - DNA, 50 bp, Artificial Sequence; identical to SEQ ID NO: 1475
  Description of Artificial Sequence: Synthetic oligonucleotide

SEQ ID NO: 2783 - DNA, 34 bp, Artificial Sequence; identical to SEQ ID NO: 1476
  Description of Artificial Sequence: Synthetic probe

SEQ ID NO: 2784 - DNA, 21 bp, Artificial Sequence
  Description of Artificial Sequence: Synthetic primer
tcacagagacttgccgatcac

SEQ ID NO: 2785 - DNA, 22 bp, Artificial Sequence
  Description of Artificial Sequence: Synthetic primer
tggccatgtctaagctacacac

SEQ ID NO: 2786 - DNA, 44 bp, Artificial Sequence; identical to SEQ ID NO: 1479
  Description of Artificial Sequence: Synthetic primer
  Description of Combined DNA/RNA Molecule: Synthetic primer

SEQ ID NO: 2787 - DNA, 24 bp, Artificial Sequence
  Description of Artificial Sequence: Synthetic primer
  Description of Combined DNA/RNA Molecule: Synthetic primer
aggtttaggttttcgaggcgtttc

SEQ ID NO: 2788 - DNA, 34 bp, Artificial Sequence; identical to SEQ ID NO: 1481
  Description of Artificial Sequence: Synthetic primer
  Description of Combined DNA/RNA Molecule: Synthetic primer

SEQ ID NO: 2789 - DNA, 58 bp, Artificial Sequence; identical to SEQ ID NO: 1482
  Description of Artificial Sequence: Synthetic oligonucleotide
  Description of Combined DNA/RNA Molecule: Synthetic oligonucleotide

SEQ ID NO: 2790 - DNA, 59 bp, Artificial Sequence; identical to SEQ ID NO: 1483
  Description of Artificial Sequence: Synthetic oligonucleotide

SEQ ID NO: 2791 - DNA, 41 bp, Artificial Sequence; identical to SEQ ID NO: 1484
  Description of Artificial Sequence: Synthetic probe

SEQ ID NO: 2792 - DNA, 21 bp, Artificial Sequence
  Description of Artificial Sequence: Synthetic primer
tcacagagacttgccgatcac

SEQ ID NO: 2793 - DNA, 22 bp, Artificial Sequence
  Description of Artificial Sequence: Synthetic primer
tggccatgtctaagctacacac

SEQ ID NO: 2794 - DNA, 51 bp, Artificial Sequence; identical to SEQ ID NO: 1487
  Description of Artificial Sequence: Synthetic primer
  Description of Combined DNA/RNA Molecule: Synthetic primer

SEQ ID NO: 2795 - DNA, 29 bp, Artificial Sequence
  Description of Artificial Sequence: Synthetic primer
  Description of Combined DNA/RNA Molecule: Synthetic primer
gaattgttagagaacgtggttttcgcgga

SEQ ID NO: 2796 - DNA, 32 bp, Artificial Sequence; identical to SEQ ID NO: 1997
  Description of Artificial Sequence: Synthetic primer
  Description of Combined DNA/RNA Molecule: Synthetic primer

SEQ ID NO: 2797 - DNA, 43 bp, Artificial Sequence; identical to SEQ ID NO: 1998
  Description of Artificial Sequence: Synthetic oligonucleotide
  Description of Combined DNA/RNA Molecule: Synthetic oligonucleotide

SEQ ID NO: 2798 - DNA, 50 bp, Artificial Sequence; identical to SEQ ID NO: 1999
  Description of Artificial Sequence: Synthetic oligonucleotide

SEQ ID NO: 2799 - DNA, 28 bp, Artificial Sequence
  Description of Artificial Sequence: Synthetic probe
ttcgggagcgttcggagtcgtcgtatag

SEQ ID NO: 2800 - DNA, 21 bp, Artificial Sequence
  Description of Artificial Sequence: Synthetic primer
tccgactttagtgcgtcacaa

SEQ ID NO: 2801 - DNA, 20 bp, Artificial Sequence
  Description of Artificial Sequence: Synthetic primer
tatacgagcgagacccacaa

SEQ ID NO: 2802 - DNA, 43 bp, Artificial Sequence; identical to SEQ ID NO: 2003
  Description of Artificial Sequence: Synthetic primer
  Description of Combined DNA/RNA Molecule: Synthetic primer

SEQ ID NO: 2803 - DNA, 29 bp, Artificial Sequence
  Description of Artificial Sequence: Synthetic primer
  Description of Combined DNA/RNA Molecule: Synthetic primer
gcgtttttgttttcgttttttagcgtaga

SEQ ID NO: 2804 - DNA, 37 bp, Artificial Sequence
  Description of Artificial Sequence: Synthetic primer
  Description of Combined DNA/RNA Molecule: Synthetic primer
ggtgtcgtggttctaacctcgaaaacgaaaccaaaca

SEQ ID NO: 2805 - DNA, 44 bp, Artificial Sequence
  Description of Artificial Sequence: Synthetic oligonucleotide
  Description of Combined DNA/RNA Molecule: Synthetic oligonucleotide
ttgcagcgggtcacaacaaagcgtaggttgggtgggatcgataa

SEQ ID NO: 2806 - DNA, 60 bp, Artificial Sequence
  Description of Artificial Sequence: Synthetic oligonucleotide
gatggttattaaagtttcgtttttcgcggtttatcgtcgttggacagaggtatacgccca

SEQ ID NO: 2807 - DNA, 37 bp, Artificial Sequence
  Description of Artificial Sequence: Synthetic probe
tttgggatcgatggttattaaagtttcgtttttcgcg

SEQ ID NO: 2808 - DNA, 19 bp, Artificial Sequence
  Description of Artificial Sequence: Synthetic primer
ttgcagcgggtcacaacaa

SEQ ID NO: 2809 - DNA, 21 bp, Artificial Sequence
  Description of Artificial Sequence: Synthetic primer
tgggcgtatacctctgtccaa

SEQ ID NO: 2810 - DNA, 50 bp, Artificial Sequence
  Description of Artificial Sequence: Synthetic primer
  Description of Combined DNA/RNA Molecule: Synthetic primer
tgggcgtatacctctgtccaacctcgaaaacgaaaccaaacgatgataag

SEQ ID NO: 2811 - DNA, 30 bp, Artificial Sequence
  Description of Artificial Sequence: Synthetic primer
  Description of Combined DNA/RNA Molecule: Synthetic primer
aagattattaaggagtacgaggagcgtata

SEQ ID NO: 2812 - DNA, 30 bp, Artificial Sequence
  Description of Artificial Sequence: Synthetic primer
  Description of Combined DNA/RNA Molecule: Synthetic primer
ggtgtcgtggactccgcgcctcgaccccgt

SEQ ID NO: 2813 - DNA, 58 bp, Artificial Sequence
  Description of Artificial Sequence: Synthetic oligonucleotide
  Description of Combined DNA/RNA Molecule: Synthetic oligonucleotide
tcgtcccggtcagtagtcaagagcgtatgttttaggaggtcgttattaaggtcgtgaa

SEQ ID NO: 2814 - DNA, 36 bp, Artificial Sequence
  Description of Artificial Sequence: Synthetic oligonucleotide
gtgggtgcggcgcgggttgcccattttctgcaccca

SEQ ID NO: 2815 - DNA, 22 bp, Artificial Sequence
  Description of Artificial Sequence: Synthetic probe
cctaaggtcgtgggtgcggcgc

SEQ ID NO: 2816 - DNA, 20 bp, Artificial Sequence
  Description of Artificial Sequence: Synthetic primer
tcgtcccggtcagtagtcaa

SEQ ID NO: 2817 - DNA, 20 bp, Artificial Sequence
  Description of Artificial Sequence: Synthetic primer
tgggtgcagaaaatgggcaa

SEQ ID NO: 2818 - DNA, 40 bp, Artificial Sequence
  Description of Artificial Sequence: Synthetic primer
  Description of Combined DNA/RNA Molecule: Synthetic primer
tgggtgcagaaaatgggcaacgcgcctcgaccctgcccca

SEQ ID NO: 2819 - DNA, 21 bp, Artificial Sequence
  Description of Artificial Sequence: Synthetic primer
  Description of Combined DNA/RNA Molecule: Synthetic primer
cgcgggaggttatggcgggaa

SEQ ID NO: 2820 - DNA, 45 bp, Artificial Sequence
  Description of Artificial Sequence: Synthetic primer
  Description of Combined DNA/RNA Molecule: Synthetic primer
ggtgtcgtggacaaaaactaatataaaaaattttcaacgccgaac

SEQ ID NO: 2821 - DNA, 47 bp, Artificial Sequence
  Description of Artificial Sequence: Synthetic oligonucleotide
  Description of Combined DNA/RNA Molecule: Synthetic oligonucleotide
ttcgtgcgtcgtgtagcaaggaatttttgtgagtttcgcagcggaaa

SEQ ID NO: 2822 - DNA, 59 bp, Artificial Sequence
  Description of Artificial Sequence: Synthetic oligonucleotide
ggaggttagaatatcgttgtggttgcgggatttttattcttgcccattttctgcaccca

SEQ ID NO: 2823 - DNA, 31 bp, Artificial Sequence
  Description of Artificial Sequence: Synthetic probe
aatcgcagcggaggttagaatatcgttgtgg

SEQ ID NO: 2824 - DNA, 19 bp, Artificial Sequence
  Description of Artificial Sequence: Synthetic primer
ttcgtgcgtcgtgtagcaa

SEQ ID NO: 2825 - DNA, 20 bp, Artificial Sequence
  Description of Artificial Sequence: Synthetic primer
tgggtgcagaaaatgggcaa

SEQ ID NO: 2826 - DNA, 51 bp, Artificial Sequence
  Description of Artificial Sequence: Synthetic primer
  Description of Combined DNA/RNA Molecule: Synthetic primer
tgggtgcagaaaatgggcaaattttcaacgccgaataaaaatcctgcaact

SEQ ID NO: 2827 - DNA, 24 bp, Artificial Sequence
  Description of Artificial Sequence: Synthetic primer
  Description of Combined DNA/RNA Molecule: Synthetic primer
ttgttggaggtgatcgagcgtaaa

SEQ ID NO: 2828 - DNA, 39 bp, Artificial Sequence
  Description of Artificial Sequence: Synthetic primer
  Description of Combined DNA/RNA Molecule: Synthetic primer
ggtgtcgtggctcctacttacaaaaacctcgatccgaat

SEQ ID NO: 2829 - DNA, 46 bp, Artificial Sequence
  Description of Artificial Sequence: Synthetic oligonucleotide
  Description of Combined DNA/RNA Molecule: Synthetic oligonucleotide
ttcgtgcgtcgtgtagcaaggtgatcgagcgtaagcgtcgcgtgca

SEQ ID NO: 2830 - DNA, 53 bp, Artificial Sequence
  Description of Artificial Sequence: Synthetic oligonucleotide
gtgtgtaaggagattaaggcgcgttatcgttcgttgcccattttctgcaccca

SEQ ID NO: 2831 - DNA, 29 bp, Artificial Sequence
  Description of Artificial Sequence: Synthetic probe
ttgcgtcgcgtgtgtaaggagattaaggc

SEQ ID NO: 2832 - DNA, 19 bp, Artificial Sequence
  Description of Artificial Sequence: Synthetic primer
ttcgtgcgtcgtgtagcaa

SEQ ID NO: 2833 - DNA, 20 bp, Artificial Sequence
  Description of Artificial Sequence: Synthetic primer
tgggtgcagaaaatgggcaa

SEQ ID NO: 2834 - DNA, 54 bp, Artificial Sequence
  Description of Artificial Sequence: Synthetic primer
  Description of Combined DNA/RNA Molecule: Synthetic primer
tgggtgcagaaaatgggcaattacaaaaacctcgatccgaacgataatgcgccc

SEQ ID NO: 2835 - DNA, 22 bp, Artificial Sequence
  Description of Artificial Sequence: Synthetic primer
  Description of Combined DNA/RNA Molecule: Synthetic primer
cgaggagggagggattcgtagc

SEQ ID NO: 2836 - DNA, 36 bp, Artificial Sequence
  Description of Artificial Sequence: Synthetic primer
  Description of Combined DNA/RNA Molecule: Synthetic primer
ggtgtcgtgggcgatcaaaaacgaaacgtcaaaatt

SEQ ID NO: 2837 - DNA, 50 bp, Artificial Sequence
  Description of Artificial Sequence: Synthetic oligonucleotide
  Description of Combined DNA/RNA Molecule: Synthetic oligonucleotide
tcacgcacgtagggtctaaacggagggattcgtagttataggagcgcgcc

SEQ ID NO: 2838 - DNA, 54 bp, Artificial Sequence
  Description of Artificial Sequence: Synthetic oligonucleotide
gcgtttcgtttcggtttcgtttgagaattttagggttgtccggctgtggttaca

SEQ ID NO: 2839 - DNA, 28 bp, Artificial Sequence
  Description of Artificial Sequence: Synthetic probe
cctaggagcgcgtttcgtttcggtttcg

SEQ ID NO: 2840 - DNA, 21 bp, Artificial Sequence
  Description of Artificial Sequence: Synthetic primer
tcacgcacgtagggtctaaac

SEQ ID NO: 2841 - DNA, 20 bp, Artificial Sequence
  Description of Artificial Sequence: Synthetic primer
tgtaaccacagccggacaac

SEQ ID NO: 2842 - DNA, 52 bp, Artificial Sequence
  Description of Artificial Sequence: Synthetic primer
  Description of Combined DNA/RNA Molecule: Synthetic primer
tgtaaccacagccggacaaccgatcaaaaacgaaacgtcaaaatctgctcag

SEQ ID NO: 2843 - DNA, 27 bp, Artificial Sequence
  Description of Artificial Sequence: Synthetic primer
  Description of Combined DNA/RNA Molecule: Synthetic primer
gaggatgggatacgtagttttcgggtc

SEQ ID NO: 2844 - DNA, 40 bp, Artificial Sequence
  Description of Artificial Sequence: Synthetic primer
  Description of Combined DNA/RNA Molecule: Synthetic primer
ggtgtcgtggaacttcgcaactaaatcaccttaaauccgg

SEQ ID NO: 2845 - DNA, 54 bp, Artificial Sequence
  Description of Artificial Sequence: Synthetic oligonucleotide
  Description of Combined DNA/RNA Molecule: Synthetic oligonucleotide
tcttacgcccagggaatgtaacatgggatacgtagttttcgggttaggcgttcc

SEQ ID NO: 2846 - DNA, 67 bp, Artificial Sequence
  Description of Artificial Sequence: Synthetic oligonucleotide
gtttttttttttttttttcggaaataacggtgttattttttagtttcgttgtccggctgtggttaca

SEQ ID NO: 2847 - DNA, 45 bp, Artificial Sequence
  Description of Artificial Sequence: Synthetic probe
ttgttaggcgtttttttttttttttttcggaaataacggtgttat

SEQ ID NO: 2848 - DNA, 22 bp, Artificial Sequence
  Description of Artificial Sequence: Synthetic primer
tcttacgcccagggaatgtaac

SEQ ID NO: 2849 - DNA, 20 bp, Artificial Sequence
  Description of Artificial Sequence: Synthetic primer
tgtaaccacagccggacaac

SEQ ID NO: 2850 - DNA, 54 bp, Artificial Sequence
  Description of Artificial Sequence: Synthetic primer
  Description of Combined DNA/RNA Molecule: Synthetic primer
tgtaaccacagccggacaacaacttcgcaactaaatcaccttaaatctgaaacc

SEQ ID NO: 2851 - DNA, 24 bp, Artificial Sequence
  Description of Artificial Sequence: Synthetic primer
  Description of Combined DNA/RNA Molecule: Synthetic primer
tttcgtttcggagcgagtcgcgac

SEQ ID NO: 2852 - DNA, 45 bp, Artificial Sequence
  Description of Artificial Sequence: Synthetic primer
  Description of Combined DNA/RNA Molecule: Synthetic primer
ggtgtcgtggaaaactataaaacgaaatttactcaataaacaatc

SEQ ID NO: 2853 - DNA, 46 bp, Artificial Sequence
  Description of Artificial Sequence: Synthetic oligonucleotide
  Description of Combined DNA/RNA Molecule: Synthetic oligonucleotide
tgagcaaaatcttcgtcgaccgagtcgcggttcggagtggcgttgc

SEQ ID NO: 2854 - DNA, 64 bp, Artificial Sequence
  Description of Artificial Sequence: Synthetic oligonucleotide
gttattcgaaagttatcggagatatcgagagagttttttaattgggttcgatgccttccgtaca

SEQ ID NO: 2855 - DNA, 38 bp, Artificial Sequence
  Description of Artificial Sequence: Synthetic probe
ttgagtggcgttattcgaaagttatcggagatatcgag

SEQ ID NO: 2856 - DNA, 21 bp, Artificial Sequence
  Description of Artificial Sequence: Synthetic primer
tgagcaaaatcttcgtcgacc

SEQ ID NO: 2857 - DNA, 20 bp, Artificial Sequence
  Description of Artificial Sequence: Synthetic primer
tgtacggaaggcatcgaacc

SEQ ID NO: 2858 - DNA, 22 bp, Artificial Sequence
  Description of Artificial Sequence: Synthetic primer
  Description of Combined DNA/RNA Molecule: Synthetic primer
cggcgggtttgtgttacgcgcc

SEQ ID NO: 2859 - DNA, 39 bp, Artificial Sequence
  Description of Artificial Sequence: Synthetic primer
  Description of Combined DNA/RNA Molecule: Synthetic primer
ggtgtcgtggcaaaacgaacaaaataacacgctcuaaag

SEQ ID NO: 2860 - DNA, 51 bp, Artificial Sequence
  Description of Artificial Sequence: Synthetic oligonucleotide
  Description of Combined DNA/RNA Molecule: Synthetic oligonucleotide
tggcacatgagagtagttgaccgtttgtgttacgcgttgtcgaatcggtcc

SEQ ID NO: 2861 - DNA, 61 bp, Artificial Sequence
  Description of Artificial Sequence: Synthetic oligonucleotide
ggttttttatgttaggtgagtgttcgttttgttcgtttaggggttcgatgccttccgtaca

SEQ ID NO: 2862 - DNA, 40 bp, Artificial Sequence
  Description of Artificial Sequence: Synthetic probe
aatcgaatcggttttttatgttaggtgagtgttcgttttg

SEQ ID NO: 2863 - DNA, 22 bp, Artificial Sequence
  Description of Artificial Sequence: Synthetic primer
tggcacatgagagtagttgacc

SEQ ID NO: 2864 - DNA, 20 bp, Artificial Sequence
  Description of Artificial Sequence: Synthetic primer
tgtacggaaggcatcgaacc

SEQ ID NO: 2865 - DNA, 52 bp, Artificial Sequence
  Description of Artificial Sequence: Synthetic primer
  Description of Combined DNA/RNA Molecule: Synthetic primer
tgtacggaaggcatcgaaccataacacgctctaaaaacgcctaaatgaacag

SEQ ID NO: 2866 - DNA, 22 bp, Artificial Sequence
  Description of Artificial Sequence: Synthetic primer
  Description of Combined DNA/RNA Molecule: Synthetic primer
tttcgggcgatcgtgtcgaaga

SEQ ID NO: 2867 - DNA, 30 bp, Artificial Sequence
  Description of Artificial Sequence: Synthetic primer
  Description of Combined DNA/RNA Molecule: Synthetic primer
ggtgtcgtggaaaaccccccgccccgactt

SEQ ID NO: 2868 - DNA, 49 bp, Artificial Sequence
  Description of Artificial Sequence: Synthetic oligonucleotide
  Description of Combined DNA/RNA Molecule: Synthetic oligonucleotide
tatagtcacgcaggaccacagtcgaaggacggtttaggaggctcgtaaa

SEQ ID NO: 2869 - DNA, 58 bp, Artificial Sequence
  Description of Artificial Sequence: Synthetic oligonucleotide
gtaggagtgcggtattatcggtagaaaatttttgatgtgtttgcggctgtctatgaca

SEQ ID NO: 2870 - DNA, 29 bp, Artificial Sequence
  Description of Artificial Sequence: Synthetic probe
ttgaggctcgtaggagtgcggtattatcg

SEQ ID NO: 2871 - DNA, 20 bp, Artificial Sequence
  Description of Artificial Sequence: Synthetic primer
tatagtcacgcaggaccaca

SEQ ID NO: 2872 - DNA, 21 bp, Artificial Sequence
  Description of Artificial Sequence: Synthetic primer
tgtcatagacagccgcaaaca

SEQ ID NO: 2873 - DNA, 47 bp, Artificial Sequence
  Description of Artificial Sequence: Synthetic primer
  Description of Combined DNA/RNA Molecule: Synthetic primer
tgtcatagacagccgcaaacaccccgactcactacacttctgutttt

SEQ ID NO: 2874 - DNA, 23 bp, Artificial Sequence
  Description of Artificial Sequence: Synthetic primer
  Description of Combined DNA/RNA Molecule: Synthetic primer
tgcgatatgggttgcgtcgagga

SEQ ID NO: 2875 - DNA, 35 bp, Artificial Sequence
  Description of Artificial Sequence: Synthetic primer
  Description of Combined DNA/RNA Molecule: Synthetic primer
ggtgtcgtggcgtacctaacctacgacgaccatca

SEQ ID NO: 2876 - DNA, 48 bp, Artificial Sequence
  Description of Artificial Sequence: Synthetic oligonucleotide
  Description of Combined DNA/RNA Molecule: Synthetic oligonucleotide
tgccctatcgaaaaggacaacacgtcgagggtaaggtagtagcggcaa

SEQ ID NO: 2877 - DNA, 53 bp, Artificial Sequence
  Description of Artificial Sequence: Synthetic oligonucleotide
ggcggtcgttttaacggagttgtagacgaaagtgtttgcggctgtctatgaca

SEQ ID NO: 2878 - DNA, 31 bp, Artificial Sequence
  Description of Artificial Sequence: Synthetic probe
tttagtagcggcggtcgttttaacggagttg

SEQ ID NO: 2879 - DNA, 22 bp, Artificial Sequence
  Description of Artificial Sequence: Synthetic primer
tgccctatcgaaaaggacaaca

SEQ ID NO: 2880 - DNA, 21 bp, Artificial Sequence
  Description of Artificial Sequence: Synthetic primer
tgtcatagacagccgcaaaca

SEQ ID NO: 2881 - DNA, 45 bp, Artificial Sequence
  Description of Artificial Sequence: Synthetic primer
  Description of Combined DNA/RNA Molecule: Synthetic primer
tgtcatagacagccgcaaacacctacgacgaccatcgctgutctc

SEQ ID NO: 2882 - DNA, 27 bp, Artificial Sequence
  Description of Artificial Sequence: Synthetic primer
  Description of Combined DNA/RNA Molecule: Synthetic primer
ttatttgaggcgtttatgtttcgttaa

SEQ ID NO: 2883 - DNA, 34 bp, Artificial Sequence
  Description of Artificial Sequence: Synthetic primer
  Description of Combined DNA/RNA Molecule: Synthetic primer
ggtgtcgtggccgaacccgaaaaaacgaaaaact

SEQ ID NO: 2884 - DNA, 46 bp, Artificial Sequence
  Description of Artificial Sequence: Synthetic oligonucleotide
  Description of Combined DNA/RNA Molecule: Synthetic oligonucleotide
taatctccagacctccgaaccgttagttagttgcgcggagcgttcc

SEQ ID NO: 2885 - DNA, 63 bp, Artificial Sequence
  Description of Artificial Sequence: Synthetic oligonucleotide
gttttttttacgtaggttttcggttttttttaggcgattagggtgtaaggattgaacgggaca

SEQ ID NO: 2886 - DNA, 32 bp, Artificial Sequence
  Description of Artificial Sequence: Synthetic probe
ttgcggagcgttttttttacgtaggttttcgg

SEQ ID NO: 2887 - DNA, 21 bp, Artificial Sequence
  Description of Artificial Sequence: Synthetic primer
taatctccagacctccgaacc

SEQ ID NO: 2888 - DNA, 22 bp, Artificial Sequence
  Description of Artificial Sequence: Synthetic primer
tgtcccgttcaatccttacacc

SEQ ID NO: 2889 - DNA, 55 bp, Artificial Sequence
  Description of Artificial Sequence: Synthetic primer
  Description of Combined DNA/RNA Molecule: Synthetic primer
tgtcccgttcaatccttacaccgaacccgaaaaaacgaaaaacctaattgcctag

SEQ ID NO: 2890 - DNA, 27 bp, Artificial Sequence
  Description of Artificial Sequence: Synthetic primer
  Description of Combined DNA/RNA Molecule: Synthetic primer
tttagtgggtggttttttcgtcgttaa

SEQ ID NO: 2891 - DNA, 41 bp, Artificial Sequence
  Description of Artificial Sequence: Synthetic primer
  Description of Combined DNA/RNA Molecule: Synthetic primer
ggtgtcgtggtaaccgcccgataaaaaaaaaaaaacuaaca

SEQ ID NO: 2892 - DNA, 51 bp, Artificial Sequence
  Description of Artificial Sequence: Synthetic oligonucleotide
  Description of Combined DNA/RNA Molecule: Synthetic oligonucleotide
ttttccgcgtcagagcacagtgggtggttttttcgtcgttagtctcggtta

SEQ ID NO: 2893 - DNA, 62 bp, Artificial Sequence
  Description of Artificial Sequence: Synthetic oligonucleotide
ggttgtagatgtacgggtagcgttatttgtttttagtttttgttatcggacctagctcgaca

SEQ ID NO: 2894 - DNA, 31 bp, Artificial Sequence
  Description of Artificial Sequence: Synthetic probe
cctagtctcggttgtagatgtacgggtagcg

SEQ ID NO: 2895 - DNA, 19 bp, Artificial Sequence
  Description of Artificial Sequence: Synthetic primer
ttttccgcgtcagagcaca

SEQ ID NO: 2896 - DNA, 22 bp, Artificial Sequence
  Description of Artificial Sequence: Synthetic primer
tgtcgagctaggtccgataaca

SEQ ID NO: 2897 - DNA, 58 bp, Artificial Sequence
  Description of Artificial Sequence: Synthetic primer
  Description of Combined DNA/RNA Molecule: Synthetic primer
tgtcgagctaggtccgataacataaccgcccgataaaaaaaaaaaaactaatgaaaag

SEQ ID NO: 2898 - DNA, 26 bp, Artificial Sequence
  Description of Artificial Sequence: Synthetic primer
  Description of Combined DNA/RNA Molecule: Synthetic primer
tttgaagttttggagggcgacgtggg

SEQ ID NO: 2899 - DNA, 35 bp, Artificial Sequence
  Description of Artificial Sequence: Synthetic primer
  Description of Combined DNA/RNA Molecule: Synthetic primer
ggtgtcgtggcgaaaaactaccgtaactgccaaag

SEQ ID NO: 2900 - DNA, 59 bp, Artificial Sequence
  Description of Artificial Sequence: Synthetic oligonucleotide
  Description of Combined DNA/RNA Molecule: Synthetic oligonucleotide
ttcgctgcccggttaaacacgacgtggatgatatagtattagttattttatcgcgggac

SEQ ID NO: 2901 - DNA, 47 bp, Artificial Sequence
  Description of Artificial Sequence: Synthetic oligonucleotide
ggagtggagatatagtggcggtaggtgttatcggacctagctcgaca

SEQ ID NO: 2902 - DNA, 29 bp, Artificial Sequence
  Description of Artificial Sequence: Synthetic probe
aattattgcggagtggagatatagtggcg

SEQ ID NO: 2903 - DNA, 19 bp, Artificial Sequence
  Description of Artificial Sequence: Synthetic primer
ttcgctgcccggttaaaca

SEQ ID NO: 2904 - DNA, 22 bp, Artificial Sequence
  Description of Artificial Sequence: Synthetic primer
tgtcgagctaggtccgataaca

SEQ ID NO: 2905 - DNA, 55 bp, Artificial Sequence
  Description of Artificial Sequence: Synthetic primer
  Description of Combined DNA/RNA Molecule: Synthetic primer
tgtcgagctaggtccgataacactaccgtaaccgccaaaaactaaaaatgattct

SEQ ID NO: 2906 - DNA, 24 bp, Artificial Sequence
  Description of Artificial Sequence: Synthetic primer
  Description of Combined DNA/RNA Molecule: Synthetic primer
cgcggtggttttaggagtcgtaga

SEQ ID NO: 2907 - DNA, 35 bp, Artificial Sequence
  Description of Artificial Sequence: Synthetic primer
  Description of Combined DNA/RNA Molecule: Synthetic primer
ggtgtcgtggcctatttacccccgcgttaaataca

SEQ ID NO: 2908 - DNA, 57 bp, Artificial Sequence
  Description of Artificial Sequence: Synthetic oligonucleotide
  Description of Combined DNA/RNA Molecule: Synthetic oligonucleotide
ttcgctgcccggttaaacagttttaggagtcgtaggtttatagaggaaactcggtcc

SEQ ID NO: 2909 - DNA, 55 bp, Artificial Sequence
  Description of Artificial Sequence: Synthetic oligonucleotide
ggtttggtttcgattttttagttgttggcgtcgtgttatcggacctagctcgaca

SEQ ID NO: 2910 - DNA, 39 bp, Artificial Sequence
  Description of Artificial Sequence: Synthetic probe
ttgaaactcggtttggtttcgattttttagttgttggcg

SEQ ID NO: 2911 - DNA, 19 bp, Artificial Sequence
  Description of Artificial Sequence: Synthetic primer
ttcgctgcccggttaaaca

SEQ ID NO: 2912 - DNA, 22 bp, Artificial Sequence
  Description of Artificial Sequence: Synthetic primer
tgtcgagctaggtccgataaca

SEQ ID NO: 2913 - DNA, 50 bp, Artificial Sequence
  Description of Artificial Sequence: Synthetic primer
  Description of Combined DNA/RNA Molecule: Synthetic primer
tgtcgagctaggtccgataacattacccccgcgttaaatacgatgacgct

SEQ ID NO: 2914 - DNA, 40 bp, Artificial Sequence
  Description of Artificial Sequence: Synthetic primer
  Description of Combined DNA/RNA Molecule: Synthetic primer
gaaaagttaatattgaattaatgttgtttttgttcgcgtt

SEQ ID NO: 2915 - DNA, 32 bp, Artificial Sequence
  Description of Artificial Sequence: Synthetic primer
  Description of Combined DNA/RNA Molecule: Synthetic primer
ggtgtcgtggtaaccccgaccgccaacaactc

SEQ ID NO: 2916 - DNA, 48 bp, Artificial Sequence
  Description of Artificial Sequence: Synthetic oligonucleotide
  Description of Combined DNA/RNA Molecule: Synthetic oligonucleotide
tgctatgccgcattcaaccagttgtttttgttcgcgtcgtcgcgatac

SEQ ID NO: 2917 - DNA, 56 bp, Artificial Sequence
  Description of Artificial Sequence: Synthetic oligonucleotide
gatgttattttttgttgcgtacgtcgttttcggtaagtggagctagttcggcgaca

SEQ ID NO: 2918 - DNA, 34 bp, Artificial Sequence
  Description of Artificial Sequence: Synthetic probe
tttcgtcgcgatgttattttttgttgcgtacgtc

SEQ ID NO: 2919 - DNA, 20 bp, Artificial Sequence
  Description of Artificial Sequence: Synthetic primer
tgctatgccgcattcaacca

SEQ ID NO: 2920 - DNA, 19 bp, Artificial Sequence
  Description of Artificial Sequence: Synthetic primer
tgtcgccgaactagctcca

SEQ ID NO: 2921 - DNA, 45 bp, Artificial Sequence
  Description of Artificial Sequence: Synthetic primer
  Description of Combined DNA/RNA Molecule: Synthetic primer
tgtcgccgaactagctccaccgaccgccaacaacttactgaaaat

SEQ ID NO: 2922 - DNA, 29 bp, Artificial Sequence
  Description of Artificial Sequence: Synthetic primer
  Description of Combined DNA/RNA Molecule: Synthetic primer
cgttttttaatgttagcgttaggcgtttg

SEQ ID NO: 2923 - DNA, 39 bp, Artificial Sequence
  Description of Artificial Sequence: Synthetic primer
  Description of Combined DNA/RNA Molecule: Synthetic primer
ggtgtcgtggcgaaatattccccacgacaaaaacctccc

SEQ ID NO: 2924 - DNA, 54 bp, Artificial Sequence
  Description of Artificial Sequence: Synthetic oligonucleotide
  Description of Combined DNA/RNA Molecule: Synthetic oligonucleotide
tgtgccttacggaaaacccagttagcgttaggcgtttattttgtagggcgttct

SEQ ID NO: 2925 - DNA, 53 bp, Artificial Sequence
  Description of Artificial Sequence: Synthetic oligonucleotide
gtttcgttttttaaagaggagtgtgattcgcgagtggagctagttcggcgaca

SEQ ID NO: 2926 - DNA, 33 bp, Artificial Sequence
  Description of Artificial Sequence: Synthetic probe
aagtagggcgtttcgttttttaaagaggagtgt

SEQ ID NO: 2927 - DNA, 20 bp, Artificial Sequence
  Description of Artificial Sequence: Synthetic primer
tgtgccttacggaaaaccca

SEQ ID NO: 2928 - DNA, 19 bp, Artificial Sequence
  Description of Artificial Sequence: Synthetic primer
tgtcgccgaactagctcca

SEQ ID NO: 2929 - DNA, 52 bp, Artificial Sequence
  Description of Artificial Sequence: Synthetic primer
  Description of Combined DNA/RNA Molecule: Synthetic primer
tgtcgccgaactagctccacgacaaaaacctcctatctaaactcgtgaagcg

SEQ ID NO: 2930 - DNA, 20 bp, Artificial Sequence
  Description of Artificial Sequence: Synthetic primer
  Description of Combined DNA/RNA Molecule: Synthetic primer
ttggaggcgttcggcgtgga

SEQ ID NO: 2931 - DNA, 35 bp, Artificial Sequence
  Description of Artificial Sequence: Synthetic primer
  Description of Combined DNA/RNA Molecule: Synthetic primer
ggtgtcgtggctcgctacgccgcgaataaautcgg

SEQ ID NO: 2932 - DNA, 48 bp, Artificial Sequence
  Description of Artificial Sequence: Synthetic oligonucleotide
  Description of Combined DNA/RNA Molecule: Synthetic oligonucleotide
tcctgctctgaaaacctacacccgttcggcgtgaggttttcacggcag

SEQ ID NO: 2933 - DNA, 60 bp, Artificial Sequence
  Description of Artificial Sequence: Synthetic oligonucleotide
ggcgattttttttcggtcgtttttttatcgtagttcgaggttacataggcggcttagaca

SEQ ID NO: 2934 - DNA, 39 bp, Artificial Sequence
  Description of Artificial Sequence: Synthetic probe
ttttttcacggcgattttttttcggtcgtttttttatcg

SEQ ID NO: 2935 - DNA, 22 bp, Artificial Sequence
  Description of Artificial Sequence: Synthetic primer
tcctgctctgaaaacctacacc

SEQ ID NO: 2936 - DNA, 22 bp, Artificial Sequence
  Description of Artificial Sequence: Synthetic primer
tgtctaagccgcctatgtaacc

SEQ ID NO: 2937 - DNA, 51 bp, Artificial Sequence
  Description of Artificial Sequence: Synthetic primer
  Description of Combined DNA/RNA Molecule: Synthetic primer
tgtctaagccgcctatgtaaccctcgctacgccgcgaataaatttgaactg

SEQ ID NO: 2938 - DNA, 27 bp, Artificial Sequence
  Description of Artificial Sequence: Synthetic primer
  Description of Combined DNA/RNA Molecule: Synthetic primer
gtagtttttgtggagtcgttgcgggtc

SEQ ID NO: 2939 - DNA, 32 bp, Artificial Sequence
  Description of Artificial Sequence: Synthetic primer
  Description of Combined DNA/RNA Molecule: Synthetic primer
ggtgtcgtggccgatatcccgcccctcgcccc

SEQ ID NO: 2940 - DNA, 40 bp, Artificial Sequence
  Description of Artificial Sequence: Synthetic oligonucleotide
  Description of Combined DNA/RNA Molecule: Synthetic oligonucleotide
tttttacgcacagcaccaccgcgggttcgcgtagcgtgcc

SEQ ID NO: 2941 - DNA, 53 bp, Artificial Sequence
  Description of Artificial Sequence: Synthetic oligonucleotide
gtgttcgggagattttaaagatcgtcgggtgggttacataggcggcttagaca

SEQ ID NO: 2942 - DNA, 32 bp, Artificial Sequence
  Description of Artificial Sequence: Synthetic probe
aagcgtagcgtgttcgggagattttaaagatc

SEQ ID NO: 2943 - DNA, 20 bp, Artificial Sequence
  Description of Artificial Sequence: Synthetic primer
tttttacgcacagcaccacc

SEQ ID NO: 2944 - DNA, 22 bp, Artificial Sequence
  Description of Artificial Sequence: Synthetic primer
tgtctaagccgcctatgtaacc

SEQ ID NO: 2945 - DNA, 44 bp, Artificial Sequence
  Description of Artificial Sequence: Synthetic primer
  Description of Combined DNA/RNA Molecule: Synthetic primer
tgtctaagccgcctatgtaaccccctcaacccccacctgacgac

SEQ ID NO: 2946 - DNA, 23 bp, Artificial Sequence
  Description of Artificial Sequence: Synthetic primer
  Description of Combined DNA/RNA Molecule: Synthetic primer
taggtagcggttggcgtcgggtg

SEQ ID NO: 2947 - DNA, 38 bp, Artificial Sequence
  Description of Artificial Sequence: Synthetic primer
  Description of Combined DNA/RNA Molecule: Synthetic primer
ggtgtcgtggtttcactccctaacgacaatctcaaaat

SEQ ID NO: 2948 - DNA, 50 bp, Artificial Sequence
  Description of Artificial Sequence: Synthetic oligonucleotide
  Description of Combined DNA/RNA Molecule: Synthetic oligonucleotide
tggacacttcgcccttcttaacggttggcgtcgggtatacgagtcggtta

SEQ ID NO: 2949 - DNA, 62 bp, Artificial Sequence
  Description of Artificial Sequence: Synthetic oligonucleotide
ggtcgagtttttttgttagttagtttcgggtatttttagtggtttgggatctgggcatcaca

SEQ ID NO: 2950 - DNA, 37 bp, Artificial Sequence
  Description of Artificial Sequence: Synthetic probe
ccacgagtcggtcgagtttttttgttagttagtttcg

SEQ ID NO: 2951 - DNA, 22 bp, Artificial Sequence
  Description of Artificial Sequence: Synthetic primer
tggacacttcgcccttcttaac

SEQ ID NO: 2952 - DNA, 21 bp, Artificial Sequence
  Description of Artificial Sequence: Synthetic primer
tgtgatgcccagatcccaaac

SEQ ID NO: 2953 - DNA, 55 bp, Artificial Sequence
  Description of Artificial Sequence: Synthetic primer
  Description of Combined DNA/RNA Molecule: Synthetic primer
tgtgatgcccagatcccaaactttcactccctaacgacaatctcaaaatgcactg

SEQ ID NO: 2954 - DNA, 32 bp, Artificial Sequence
  Description of Artificial Sequence: Synthetic primer
  Description of Combined DNA/RNA Molecule: Synthetic primer
gtgtttataaagtaggaagcgaagaacgtttc

SEQ ID NO: 2955 - DNA, 33 bp, Artificial Sequence
  Description of Artificial Sequence: Synthetic primer
  Description of Combined DNA/RNA Molecule: Synthetic primer
ggtgtcgtgggcaacgaaacccgaatccctacc

SEQ ID NO: 2956 - DNA, 57 bp, Artificial Sequence
  Description of Artificial Sequence: Synthetic oligonucleotide
  Description of Combined DNA/RNA Molecule: Synthetic oligonucleotide
tggaggccggagaaattaaacggaagcgaagaacgttttttttatttagggcgtaac

SEQ ID NO: 2957 - DNA, 55 bp, Artificial Sequence
  Description of Artificial Sequence: Synthetic oligonucleotide
gtagtcgttttgcggaaggtatagttcgggtttcgtttgggatctgggcatcaca

SEQ ID NO: 2958 - DNA, 33 bp, Artificial Sequence
  Description of Artificial Sequence: Synthetic probe
ccttagggcgtagtcgttttgcggaaggtatag

SEQ ID NO: 2959 - DNA, 21 bp, Artificial Sequence
  Description of Artificial Sequence: Synthetic primer
tggaggccggagaaattaaac

SEQ ID NO: 2960 - DNA, 21 bp, Artificial Sequence
  Description of Artificial Sequence: Synthetic primer
tgtgatgcccagatcccaaac

SEQ ID NO: 2961 - DNA, 49 bp, Artificial Sequence
  Description of Artificial Sequence: Synthetic primer
  Description of Combined DNA/RNA Molecule: Synthetic primer
tgtgatgcccagatcccaaacccctacttaactcccgaaacctgaactg

SEQ ID NO: 2962 - DNA, 30 bp, Artificial Sequence
  Description of Artificial Sequence: Synthetic primer
  Description of Combined DNA/RNA Molecule: Synthetic primer
gttgacggtatagagtagtgaagacgataa

SEQ ID NO: 2963 - DNA, 38 bp, Artificial Sequence
  Description of Artificial Sequence: Synthetic primer
  Description of Combined DNA/RNA Molecule: Synthetic primer
ggtgtcgtggcgcaactataacgaacaaaacgauttct

SEQ ID NO: 2964 - DNA, 54 bp, Artificial Sequence
  Description of Artificial Sequence: Synthetic oligonucleotide
  Description of Combined DNA/RNA Molecule: Synthetic oligonucleotide
ttgtctctgcgacccatcaagtagtgaagacgatagttggatttttagcgttga

SEQ ID NO: 2965 - DNA, 57 bp, Artificial Sequence
  Description of Artificial Sequence: Synthetic oligonucleotide
gttagcgagagataatgggttcgttaaagtcggaagtcttggtacacgttcggcaca

SEQ ID NO: 2966 - DNA, 34 bp, Artificial Sequence
  Description of Artificial Sequence: Synthetic probe
ccttttagcgttagcgagagataatgggttcgtt

SEQ ID NO: 2967 - DNA, 20 bp, Artificial Sequence
  Description of Artificial Sequence: Synthetic primer
ttgtctctgcgacccatcaa

SEQ ID NO: 2968 - DNA, 19 bp, Artificial Sequence
  Description of Artificial Sequence: Synthetic primer
tgtgccgaacgtgtaccaa

SEQ ID NO: 2969 - DNA, 49 bp, Artificial Sequence
  Description of Artificial Sequence: Synthetic primer
  Description of Combined DNA/RNA Molecule: Synthetic primer
tgtgccgaacgtgtaccaacgaacaaaacgatttccgacttctgacttc

SEQ ID NO: 2970 - DNA, 34 bp, Artificial Sequence
  Description of Artificial Sequence: Synthetic primer
  Description of Combined DNA/RNA Molecule: Synthetic primer
atagatttttattcgttagtttacgttacggttg

SEQ ID NO: 2971 - DNA, 38 bp, Artificial Sequence
  Description of Artificial Sequence: Synthetic primer
  Description of Combined DNA/RNA Molecule: Synthetic primer
ggtgtcgtggaacgtctacaaaccgaaactaaactcag

SEQ ID NO: 2972 - DNA, 58 bp, Artificial Sequence
  Description of Artificial Sequence: Synthetic oligonucleotide
  Description of Combined DNA/RNA Molecule: Synthetic oligonucleotide
tggataaactaagtccgcccaccgttacggttatgtaatttttagttcggctcggacc

SEQ ID NO: 2973 - DNA, 49 bp, Artificial Sequence
  Description of Artificial Sequence: Synthetic oligonucleotide
ggatttgaggcgtggtttgaaagtcggggtgactgagcgacgtctaaca

SEQ ID NO: 2974 - DNA, 24 bp, Artificial Sequence
  Description of Artificial Sequence: Synthetic probe
aatcggctcggatttgaggcgtgg

SEQ ID NO: 2975 - DNA, 22 bp, Artificial Sequence
  Description of Artificial Sequence: Synthetic primer
tggataaactaagtccgcccac

SEQ ID NO: 2976 - DNA, 21 bp, Artificial Sequence
  Description of Artificial Sequence: Synthetic primer
tgttagacgtcgctcagtcac

SEQ ID NO: 2977 - DNA, 59 bp, Artificial Sequence
  Description of Artificial Sequence: Synthetic primer
  Description of Combined DNA/RNA Molecule: Synthetic primer
tgttagacgtcgctcagtcacgaaactaaactcaaaaaacaaaatacaaacctgacttc

SEQ ID NO: 2978 - DNA, 26 bp, Artificial Sequence
  Description of Artificial Sequence: Synthetic primer
  Description of Combined DNA/RNA Molecule: Synthetic primer
tgataagttttttacgcgggcggcgc

SEQ ID NO: 2979 - DNA, 36 bp, Artificial Sequence
  Description of Artificial Sequence: Synthetic primer
  Description of Combined DNA/RNA Molecule: Synthetic primer
ggtgtcgtggtccgaatacacgaaatcgaaautcat

SEQ ID NO: 2980 - DNA, 53 bp, Artificial Sequence
  Description of Artificial Sequence: Synthetic oligonucleotide
  Description of Combined DNA/RNA Molecule: Synthetic oligonucleotide
tcctgaattggccacaccacgcggcgttagcgttgatttttttaggtcgttag

SEQ ID NO: 2981 - DNA, 65 bp, Artificial Sequence
  Description of Artificial Sequence: Synthetic oligonucleotide
gtttagttttggttagtatcgattaggtcgatttttagggttttgtgactgagcgacgtctaaca

SEQ ID NO: 2982 - DNA, 40 bp, Artificial Sequence
  Description of Artificial Sequence: Synthetic probe
aattaggtcgtttagttttggttagtatcgattaggtcga

SEQ ID NO: 2983 - DNA, 20 bp, Artificial Sequence
  Description of Artificial Sequence: Synthetic primer
tcctgaattggccacaccac

SEQ ID NO: 2984 - DNA, 21 bp, Artificial Sequence
  Description of Artificial Sequence: Synthetic primer
tgttagacgtcgctcagtcac

SEQ ID NO: 2985 - DNA, 53 bp, Artificial Sequence
  Description of Artificial Sequence: Synthetic primer
  Description of Combined DNA/RNA Molecule: Synthetic primer
tgttagacgtcgctcagtcactccgaatacacgaaatcgaaattcatguaaac

SEQ ID NO: 2986 - DNA, 25 bp, Artificial Sequence
  Description of Artificial Sequence: Synthetic primer
  Description of Combined DNA/RNA Molecule: Synthetic primer
gggagggtttgtttcgtttcggttc

SEQ ID NO: 2987 - DNA, 33 bp, Artificial Sequence
  Description of Artificial Sequence: Synthetic primer
  Description of Combined DNA/RNA Molecule: Synthetic primer
ggtgtcgtggaacgccctcacttcgaaaaaacg

SEQ ID NO: 2988 - DNA, 55 bp, Artificial Sequence
  Description of Artificial Sequence: Synthetic oligonucleotide
  Description of Combined DNA/RNA Molecule: Synthetic oligonucleotide
ttcttgcggttctggaacaccggtttaggatttttgttttcggttgaggcgtaat

SEQ ID NO: 2989 - DNA, 55 bp, Artificial Sequence
  Description of Artificial Sequence: Synthetic oligonucleotide
gtagcgtttttagtcgttcgtaggagggatcgacgtgatgctccgttgttgctaa

SEQ ID NO: 2990 - DNA, 33 bp, Artificial Sequence
  Description of Artificial Sequence: Synthetic probe
ttttgaggcgtagcgtttttagtcgttcgtagg

SEQ ID NO: 2991 - DNA, 20 bp, Artificial Sequence
  Description of Artificial Sequence: Synthetic primer
ttcttgcggttctggaacac

SEQ ID NO: 2992 - DNA, 21 bp, Artificial Sequence
  Description of Artificial Sequence: Synthetic primer
ttagcaacaacggagcatcac

SEQ ID NO: 2993 - DNA, 54 bp, Artificial Sequence
  Description of Artificial Sequence: Synthetic primer
  Description of Combined DNA/RNA Molecule: Synthetic primer
ttagcaacaacggagcatcacccctcacttcgaaaaaacaaaaacgttgatcct

SEQ ID NO: 2994 - DNA, 28 bp, Artificial Sequence
  Description of Artificial Sequence: Synthetic primer
  Description of Combined DNA/RNA Molecule: Synthetic primer
gttaggttatcgcgttgattttcgagag

SEQ ID NO: 2995 - DNA, 34 bp, Artificial Sequence
  Description of Artificial Sequence: Synthetic primer
  Description of Combined DNA/RNA Molecule: Synthetic primer
ggtgtcgtggaacctccgaaaatcgtcgcucaca

SEQ ID NO: 2996 - DNA, 59 bp, Artificial Sequence
  Description of Artificial Sequence: Synthetic oligonucleotide
  Description of Combined DNA/RNA Molecule: Synthetic oligonucleotide
tatggtaaaatgtcagcggcacgaagtttgatttggagtcggatatttattatcgttgc

SEQ ID NO: 2997 - DNA, 56 bp, Artificial Sequence
  Description of Artificial Sequence: Synthetic oligonucleotide
gttatgattcggttagcgtgtttaacggagtcgtggtgatgctccgttgttgctaa

SEQ ID NO: 2998 - DNA, 39 bp, Artificial Sequence
  Description of Artificial Sequence: Synthetic probe
aatattatcgttatgattcggttagcgtgtttaacggag

SEQ ID NO: 2999 - DNA, 22 bp, Artificial Sequence
  Description of Artificial Sequence: Synthetic primer
tatggtaaaatgtcagcggcac

SEQ ID NO: 3000 - DNA, 21 bp, Artificial Sequence
  Description of Artificial Sequence: Synthetic primer
ttagcaacaacggagcatcac

SEQ ID NO: 3001 - DNA, 47 bp, Artificial Sequence
  Description of Artificial Sequence: Synthetic primer
  Description of Combined DNA/RNA Molecule: Synthetic primer
ttagcaacaacggagcatcacctccgaaaatcgtcgctcatgactct

SEQ ID NO: 3002 - DNA, 26 bp, Artificial Sequence
  Description of Artificial Sequence: Synthetic primer
  Description of Combined DNA/RNA Molecule: Synthetic primer
gttttttgggaggtggtgttcgtaag

SEQ ID NO: 3003 - DNA, 35 bp, Artificial Sequence
  Description of Artificial Sequence: Synthetic primer
  Description of Combined DNA/RNA Molecule: Synthetic primer
ggtgtcgtggcctaaacacgcgaaacgaaaaccgg

SEQ ID NO: 3004 - DNA, 46 bp, Artificial Sequence
  Description of Artificial Sequence: Synthetic oligonucleotide
  Description of Combined DNA/RNA Molecule: Synthetic oligonucleotide
tcctcgagccgatgacacattggtagttgattgggtggagcgtgcc

SEQ ID NO: 3005 - DNA, 49 bp, Artificial Sequence
  Description of Artificial Sequence: Synthetic oligonucleotide
gtgttttttttggtagtcgcggaggagaagtgtaacgtccgtgggctaa

SEQ ID NO: 3006 - DNA, 31 bp, Artificial Sequence
  Description of Artificial Sequence: Synthetic probe
ttgtggagcgtgttttttttggtagtcgcgg

SEQ ID NO: 3007 - DNA, 19 bp, Artificial Sequence
  Description of Artificial Sequence: Synthetic primer
tcctcgagccgatgacaca

SEQ ID NO: 3008 - DNA, 19 bp, Artificial Sequence
  Description of Artificial Sequence: Synthetic primer
ttagcccacggacgttaca

SEQ ID NO: 3009 - DNA, 48 bp, Artificial Sequence
  Description of Artificial Sequence: Synthetic primer
  Description of Combined DNA/RNA Molecule: Synthetic primer
ttagcccacggacgttacacctaaacacgcgaaacgaaaactgaagct

SEQ ID NO: 3010 - DNA, 28 bp, Artificial Sequence
  Description of Artificial Sequence: Synthetic primer
  Description of Combined DNA/RNA Molecule: Synthetic primer
gcggtagtgagaatgagtttttcgagac

SEQ ID NO: 3011 - DNA, 35 bp, Artificial Sequence
  Description of Artificial Sequence: Synthetic primer
  Description of Combined DNA/RNA Molecule: Synthetic primer
ggtgtcgtggaaaatcgccgcgaaattttcaaatt

SEQ ID NO: 3012 - DNA, 56 bp, Artificial Sequence
  Description of Artificial Sequence: Synthetic oligonucleotide
  Description of Combined DNA/RNA Molecule: Synthetic oligonucleotide
tctgcccaaaatactgcacaaggtagtgagaatgagtttttcgagatcatcgggca

SEQ ID NO: 3013 - DNA, 65 bp, Artificial Sequence
  Description of Artificial Sequence: Synthetic oligonucleotide
gggagattatataataacgacgaagttatttgtcgggttattcgttgaaactgaggcggtgttca

SEQ ID NO: 3014 - DNA, 44 bp, Artificial Sequence
  Description of Artificial Sequence: Synthetic probe
ttgatcatcgggagattatataataacgacgaagttatttgtcg

SEQ ID NO: 3015 - DNA, 21 bp, Artificial Sequence
  Description of Artificial Sequence: Synthetic primer
tctgcccaaaatactgcacaa

SEQ ID NO: 3016 - DNA, 21 bp, Artificial Sequence
  Description of Artificial Sequence: Synthetic primer
tgaacaccgcctcagtttcaa

SEQ ID NO: 3017 - DNA, 51 bp, Artificial Sequence
  Description of Artificial Sequence: Synthetic primer
  Description of Combined DNA/RNA Molecule: Synthetic primer
tgaacaccgcctcagtttcaagccgcgaaattttcaaatctcgatgaatag

SEQ ID NO: 3018 - DNA, 20 bp, Artificial Sequence
  Description of Artificial Sequence: Synthetic primer
  Description of Combined DNA/RNA Molecule: Synthetic primer
gtgtcggcggtaggcggtga

SEQ ID NO: 3019 - DNA, 30 bp, Artificial Sequence; identical to SEQ ID NO: 2424
  Description of Artificial Sequence: Synthetic primer
  Description of Combined DNA/RNA Molecule: Synthetic primer

SEQ ID NO: 3020 - DNA, 50 bp, Artificial Sequence; identical to SEQ ID NO: 2425
  Description of Artificial Sequence: Synthetic oligonucleotide
  Description of Combined DNA/RNA Molecule: Synthetic oligonucleotide

SEQ ID NO: 3021 - DNA, 41 bp, Artificial Sequence; identical to SEQ ID NO: 2426
  Description of Artificial Sequence: Synthetic oligonucleotide

SEQ ID NO: 3022 - DNA, 21 bp, Artificial Sequence
  Description of Artificial Sequence: Synthetic probe
ttagggctcggtcgcggtttc

SEQ ID NO: 3023 - DNA, 22 bp, Artificial Sequence
  Description of Artificial Sequence: Synthetic primer
tctcatgggcgctagtatcaac

SEQ ID NO: 3024 - DNA, 22 bp, Artificial Sequence
  Description of Artificial Sequence: Synthetic primer
tgcgggtatcaatcagggaaac

SEQ ID NO: 3025 - DNA, 47 bp, Artificial Sequence; identical to SEQ ID NO: 2430
  Description of Artificial Sequence: Synthetic primer
  Description of Combined DNA/RNA Molecule: Synthetic primer

SEQ ID NO: 3026 - DNA, 32 bp, Artificial Sequence
  Description of Artificial Sequence: Synthetic primer
  Description of Combined DNA/RNA Molecule: Synthetic primer
gttatgttgaggttttcgattttattcgcgtc

SEQ ID NO: 3027 - DNA, 36 bp, Artificial Sequence
  Description of Artificial Sequence: Synthetic primer
  Description of Combined DNA/RNA Molecule: Synthetic primer
ggtgtcgtggcgaaccgactaaaacgacaaaaacag

SEQ ID NO: 3028 - DNA, 61 bp, Artificial Sequence
  Description of Artificial Sequence: Synthetic oligonucleotide
  Description of Combined DNA/RNA Molecule: Synthetic oligonucleotide
tactatcgtatcacgccgacagttttcgattttattcgcgtttttttttttttctcgttta

SEQ ID NO: 3029 - DNA, 53 bp, Artificial Sequence
  Description of Artificial Sequence: Synthetic oligonucleotide
gttcgcggtatagttttatttcgcgttgtcgttgtgtaacgtccgtgggctaa

SEQ ID NO: 3030 - DNA, 37 bp, Artificial Sequence
  Description of Artificial Sequence: Synthetic probe
ccttttctcgttcgcggtatagttttatttcgcgttg

SEQ ID NO: 3031 - DNA, 21 bp, Artificial Sequence
  Description of Artificial Sequence: Synthetic primer
tactatcgtatcacgccgaca

SEQ ID NO: 3032 - DNA, 19 bp, Artificial Sequence
  Description of Artificial Sequence: Synthetic primer
ttagcccacggacgttaca

SEQ ID NO: 3033 - DNA, 53 bp, Artificial Sequence
  Description of Artificial Sequence: Synthetic primer
  Description of Combined DNA/RNA Molecule: Synthetic primer
ttagcccacggacgttacacgactaaaacgacaaaaacaaaaacaatgacaat

SEQ ID NO: 3034 - DNA, 27 bp, Artificial Sequence
  Description of Artificial Sequence: Synthetic primer
  Description of Combined DNA/RNA Molecule: Synthetic primer
ggatttgtttttgagaggagacgtgga

SEQ ID NO: 3035 - DNA, 43 bp, Artificial Sequence
  Description of Artificial Sequence: Synthetic primer
  Description of Combined DNA/RNA Molecule: Synthetic primer
ggtgtcgtggcgaaaaaaaaaaaaaaacgcgaataaaaucgag

SEQ ID NO: 3036 - DNA, 48 bp, Artificial Sequence
  Description of Artificial Sequence: Synthetic oligonucleotide
  Description of Combined DNA/RNA Molecule: Synthetic oligonucleotide
ttgagaccgctgaccgacatttttgagaggagacgtgggtctcggtga

SEQ ID NO: 3037 - DNA, 50 bp, Artificial Sequence
  Description of Artificial Sequence: Synthetic oligonucleotide
ggtagtgcggattcgttcggttatgttgaggtgttgcacggtcgagctaa

SEQ ID NO: 3038 - DNA, 27 bp, Artificial Sequence
  Description of Artificial Sequence: Synthetic probe
aagggtctcggtagtgcggattcgttc

SEQ ID NO: 3039 - DNA, 19 bp, Artificial Sequence
  Description of Artificial Sequence: Synthetic primer
ttgagaccgctgaccgaca

SEQ ID NO: 3040 - DNA, 19 bp, Artificial Sequence
  Description of Artificial Sequence: Synthetic primer
ttagctcgaccgtgcaaca

SEQ ID NO: 3041 - DNA, 55 bp, Artificial Sequence
  Description of Artificial Sequence: Synthetic primer
  Description of Combined DNA/RNA Molecule: Synthetic primer
ttagctcgaccgtgcaacacgaaaaaaaaaaaaaaacgcgaataaaattgaaaat

SEQ ID NO: 3042 - DNA, 27 bp, Artificial Sequence
  Description of Artificial Sequence: Synthetic primer
  Description of Combined DNA/RNA Molecule: Synthetic primer
gttaggtcgtagtattgtggtcggtgt

SEQ ID NO: 3043 - DNA, 36 bp, Artificial Sequence
  Description of Artificial Sequence: Synthetic primer
  Description of Combined DNA/RNA Molecule: Synthetic primer
ggtgtcgtggcgacaacccgacttactctacaacgg

SEQ ID NO: 3044 - DNA, 40 bp, Artificial Sequence
  Description of Artificial Sequence: Synthetic oligonucleotide
  Description of Combined DNA/RNA Molecule: Synthetic oligonucleotide
tcgcaacgtgccgaatacagtggtagaggcggagcggtcc

SEQ ID NO: 3045 - DNA, 55 bp, Artificial Sequence
  Description of Artificial Sequence: Synthetic oligonucleotide
ggttttatcgttcggttttttcgtttacgtttttcgtgttgcacggtcgagctaa

SEQ ID NO: 3046 - DNA, 32 bp, Artificial Sequence
  Description of Artificial Sequence: Synthetic probe
ttgcggagcggttttatcgttcggttttttcg

SEQ ID NO: 3047 - DNA, 19 bp, Artificial Sequence
  Description of Artificial Sequence: Synthetic primer
tcgcaacgtgccgaataca

SEQ ID NO: 3048 - DNA, 19 bp, Artificial Sequence
  Description of Artificial Sequence: Synthetic primer
ttagctcgaccgtgcaaca

SEQ ID NO: 3049 - DNA, 50 bp, Artificial Sequence
  Description of Artificial Sequence: Synthetic primer
  Description of Combined DNA/RNA Molecule: Synthetic primer
ttagctcgaccgtgcaacacccgacttactctacaacgaaaaatguaaat

SEQ ID NO: 3050 - DNA, 31 bp, Artificial Sequence
  Description of Artificial Sequence: Synthetic primer
  Description of Combined DNA/RNA Molecule: Synthetic primer
gttgataacgtatgtgcgaaagagacgcgga

SEQ ID NO: 3051 - DNA, 38 bp, Artificial Sequence
  Description of Artificial Sequence: Synthetic primer
  Description of Combined DNA/RNA Molecule: Synthetic primer
ggtgtcgtggactaaacgaccgacaaaaacgtauatct

SEQ ID NO: 3052 - DNA, 59 bp, Artificial Sequence
  Description of Artificial Sequence: Synthetic oligonucleotide
  Description of Combined DNA/RNA Molecule: Synthetic oligonucleotide
taacgggattgagagtggacagcgaggtttagttagtttttttcgtatttaaacgtata

SEQ ID NO: 3053 - DNA, 56 bp, Artificial Sequence
  Description of Artificial Sequence: Synthetic oligonucleotide
gtacgttttaattgtcgggcgtttttatttgatacggtgtctgccgcccttactaa

SEQ ID NO: 3054 - DNA, 39 bp, Artificial Sequence
  Description of Artificial Sequence: Synthetic probe
cctttaaacgtacgttttaattgtcgggcgtttttattt

SEQ ID NO: 3055 - DNA, 21 bp, Artificial Sequence
  Description of Artificial Sequence: Synthetic primer
taacgggattgagagtggaca

SEQ ID NO: 3056 - DNA, 19 bp, Artificial Sequence
  Description of Artificial Sequence: Synthetic primer
ttagtaagggcggcagaca

SEQ ID NO: 3057 - DNA, 52 bp, Artificial Sequence
  Description of Artificial Sequence: Synthetic primer
  Description of Combined DNA/RNA Molecule: Synthetic primer
ttagtaagggcggcagacactaaacgaccgacaaaaacgtatatctguatcg

SEQ ID NO: 3058 - DNA, 25 bp, Artificial Sequence
  Description of Artificial Sequence: Synthetic primer
  Description of Combined DNA/RNA Molecule: Synthetic primer
tttgggagtcggttttttgcgaagt

SEQ ID NO: 3059 - DNA, 35 bp, Artificial Sequence
  Description of Artificial Sequence: Synthetic primer
  Description of Combined DNA/RNA Molecule: Synthetic primer
ggtgtcgtgggaaacgcgcaacctctaatactaat

SEQ ID NO: 3060 - DNA, 49 bp, Artificial Sequence
  Description of Artificial Sequence: Synthetic oligonucleotide
  Description of Combined DNA/RNA Molecule: Synthetic oligonucleotide
taacgggattgagagtggacatttgcgaagcgttgattgaaagcgttga

SEQ ID NO: 3061 - DNA, 54 bp, Artificial Sequence
  Description of Artificial Sequence: Synthetic oligonucleotide
gttagatcgaggtttcgggaggaaatagatttcggtgtctgccgcccttactaa

SEQ ID NO: 3062 - DNA, 31 bp, Artificial Sequence
  Description of Artificial Sequence: Synthetic probe
cctgaaagcgttagatcgaggtttcgggagg

SEQ ID NO: 3063 - DNA, 21 bp, Artificial Sequence
  Description of Artificial Sequence: Synthetic primer
taacgggattgagagtggaca

SEQ ID NO: 3064 - DNA, 19 bp, Artificial Sequence
  Description of Artificial Sequence: Synthetic primer
ttagtaagggcggcagaca

SEQ ID NO: 3065 - DNA, 53 bp, Artificial Sequence
  Description of Artificial Sequence: Synthetic primer
  Description of Combined DNA/RNA Molecule: Synthetic primer
ttagtaagggcggcagacacgcaacctctaatactaaccttattcctgaaatt

SEQ ID NO: 3066 - DNA, 21 bp, Artificial Sequence
  Description of Artificial Sequence: Synthetic primer
  Description of Combined DNA/RNA Molecule: Synthetic primer
gaggcggtgagtgagcgcgtc

SEQ ID NO: 3067 - DNA, 36 bp, Artificial Sequence
  Description of Artificial Sequence: Synthetic primer
  Description of Combined DNA/RNA Molecule: Synthetic primer
ggtgtcgtggccacatactccgaaaccgaaacccag

SEQ ID NO: 3068 - DNA, 41 bp, Artificial Sequence
  Description of Artificial Sequence: Synthetic oligonucleotide
  Description of Combined DNA/RNA Molecule: Synthetic oligonucleotide
ttggtacgaggagggcacatgagcgcgttgggagtcgagcc

SEQ ID NO: 3069 - DNA, 59 bp, Artificial Sequence
  Description of Artificial Sequence: Synthetic oligonucleotide
gagtttcgggtttagttagggtttaaagttcgtttttttgtgtctgccgcccttactaa

SEQ ID NO: 3070 - DNA, 37 bp, Artificial Sequence
  Description of Artificial Sequence: Synthetic probe
aagggagtcgagtttcgggtttagttagggtttaaag

SEQ ID NO: 3071 - DNA, 19 bp, Artificial Sequence
  Description of Artificial Sequence: Synthetic primer
ttggtacgaggagggcaca

SEQ ID NO: 3072 - DNA, 19 bp, Artificial Sequence
  Description of Artificial Sequence: Synthetic primer
ttagtaagggcggcagaca

SEQ ID NO: 3073 - DNA, 48 bp, Artificial Sequence
  Description of Artificial Sequence: Synthetic primer
  Description of Combined DNA/RNA Molecule: Synthetic primer
ttagtaagggcggcagacaccgaaaccgaaacccaaaaaaatgaactc

SEQ ID NO: 3074 - DNA, 37 bp, Artificial Sequence
  Description of Artificial Sequence: Synthetic primer
  Description of Combined DNA/RNA Molecule: Synthetic primer
tgttataagttggttagtattatttttaagacggtga

SEQ ID NO: 3075 - DNA, 34 bp, Artificial Sequence
  Description of Artificial Sequence: Synthetic primer
  Description of Combined DNA/RNA Molecule: Synthetic primer
ggtgtcgtggcgcgacgtatccgtaaacaacaag

SEQ ID NO: 3076 - DNA, 44 bp, Artificial Sequence
  Description of Artificial Sequence: Synthetic oligonucleotide
  Description of Combined DNA/RNA Molecule: Synthetic oligonucleotide
tcagacgcactaaacaggcaaggtggtgttgaggttagcgttat

SEQ ID NO: 3077 - DNA, 39 bp, Artificial Sequence
  Description of Artificial Sequence: Synthetic oligonucleotide
gttgcgtcgcgagggttcggttgcggatcgtcgtgtgaa

SEQ ID NO: 3078 - DNA, 24 bp, Artificial Sequence
  Description of Artificial Sequence: Synthetic probe
ttggttagcgttgcgtcgcgaggg

SEQ ID NO: 3079 - DNA, 21 bp, Artificial Sequence
  Description of Artificial Sequence: Synthetic primer
tcagacgcactaaacaggcaa

SEQ ID NO: 3080 - DNA, 19 bp, Artificial Sequence
  Description of Artificial Sequence: Synthetic primer
ttcacacgacgatccgcaa

SEQ ID NO: 3081 - DNA, 52 bp, Artificial Sequence
  Description of Artificial Sequence: Synthetic primer
  Description of Combined DNA/RNA Molecule: Synthetic primer
ttcacacgacgatccgcaagtaaacaacaaaaaatacaacgacgctgaacct

SEQ ID NO: 3082 - DNA, 35 bp, Artificial Sequence
  Description of Artificial Sequence: Synthetic primer
  Description of Combined DNA/RNA Molecule: Synthetic primer
gttgtagttttagttttttttttagatgtcggtaa

SEQ ID NO: 3083 - DNA, 36 bp, Artificial Sequence
  Description of Artificial Sequence: Synthetic primer
  Description of Combined DNA/RNA Molecule: Synthetic primer
ggtgtcgtggccctaaaaaccgtactccgtauccgg

SEQ ID NO: 3084 - DNA, 55 bp, Artificial Sequence
  Description of Artificial Sequence: Synthetic oligonucleotide
  Description of Combined DNA/RNA Molecule: Synthetic oligonucleotide
ttccatcgagcgccaacaagtagtattagtttttgtttgtatgaggttgcgagac

SEQ ID NO: 3085 - DNA, 61 bp, Artificial Sequence
  Description of Artificial Sequence: Synthetic oligonucleotide
gaggtttgtagtgatatttttcgagttttttgatttgtttcgttgcggatcgtcgtgtgaa

SEQ ID NO: 3086 - DNA, 41 bp, Artificial Sequence
  Description of Artificial Sequence: Synthetic probe
aagggttgcgaggtttgtagtgatatttttcgagttttttg

SEQ ID NO: 3087 - DNA, 19 bp, Artificial Sequence
  Description of Artificial Sequence: Synthetic primer
ttccatcgagcgccaacaa

SEQ ID NO: 3088 - DNA, 19 bp, Artificial Sequence
  Description of Artificial Sequence: Synthetic primer
ttcacacgacgatccgcaa

SEQ ID NO: 3089 - DNA, 49 bp, Artificial Sequence
  Description of Artificial Sequence: Synthetic primer
  Description of Combined DNA/RNA Molecule: Synthetic primer
ttcacacgacgatccgcaaccctaaaaaccgtactccgtatctgaaacg

SEQ ID NO: 3090 - DNA, 28 bp, Artificial Sequence
  Description of Artificial Sequence: Synthetic primer
  Description of Combined DNA/RNA Molecule: Synthetic primer
gtagtaagcgatttttcgcgttcgaggc

SEQ ID NO: 3091 - DNA, 38 bp, Artificial Sequence
  Description of Artificial Sequence: Synthetic primer
  Description of Combined DNA/RNA Molecule: Synthetic primer
ggtgtcgtggatcctcgtcctcttaaaaaacgcuaaag

SEQ ID NO: 3092 - DNA, 52 bp, Artificial Sequence
  Description of Artificial Sequence: Synthetic oligonucleotide
  Description of Combined DNA/RNA Molecule: Synthetic oligonucleotide
ttcagagcacctgcgtaccgaggttagtttttttttgggcgttcatcgtcac

SEQ ID NO: 3093 - DNA, 50 bp, Artificial Sequence
  Description of Artificial Sequence: Synthetic oligonucleotide
gtcgtttttcggcgttgttggagtttagtcgggttcttcggctggctcaa

SEQ ID NO: 3094 - DNA, 32 bp, Artificial Sequence
  Description of Artificial Sequence: Synthetic probe
ttgttcatcgtcgtttttcggcgttgttggag

SEQ ID NO: 3095 - DNA, 19 bp, Artificial Sequence
  Description of Artificial Sequence: Synthetic primer
ttcagagcacctgcgtacc

SEQ ID NO: 3096 - DNA, 19 bp, Artificial Sequence
  Description of Artificial Sequence: Synthetic primer
ttgagccagccgaagaacc

SEQ ID NO: 3097 - DNA, 54 bp, Artificial Sequence
  Description of Artificial Sequence: Synthetic primer
  Description of Combined DNA/RNA Molecule: Synthetic primer
ttgagccagccgaagaaccatcctcgtcctcttaaaaaacgctaaaatgactag

SEQ ID NO: 3098 - DNA, 25 bp, Artificial Sequence
  Description of Artificial Sequence: Synthetic primer
  Description of Combined DNA/RNA Molecule: Synthetic primer
gttttcgtcgtcgttcgttcggttt

SEQ ID NO: 3099 - DNA, 49 bp, Artificial Sequence
  Description of Artificial Sequence: Synthetic primer
  Description of Combined DNA/RNA Molecule: Synthetic primer
ggtgtcgtggtattttaaaacaaaaaaaaacctattaataaaaauccag

SEQ ID NO: 3100 - DNA, 43 bp, Artificial Sequence
  Description of Artificial Sequence: Synthetic oligonucleotide
  Description of Combined DNA/RNA Molecule: Synthetic oligonucleotide
tccggcctttgacgataccgttcgttcggttcgcgatcgtcac

SEQ ID NO: 3101 - DNA, 62 bp, Artificial Sequence
  Description of Artificial Sequence: Synthetic oligonucleotide
gtcgtattaaagtagatgtttgtagttggtttgagttggaggtaattcactcgaacggagca

SEQ ID NO: 3102 - DNA, 36 bp, Artificial Sequence
  Description of Artificial Sequence: Synthetic probe
aacgcgatcgtcgtattaaagtagatgtttgtagtt

SEQ ID NO: 3103 - DNA, 19 bp, Artificial Sequence
  Description of Artificial Sequence: Synthetic primer
tccggcctttgacgatacc

SEQ ID NO: 3104 - DNA, 22 bp, Artificial Sequence
  Description of Artificial Sequence: Synthetic primer
tgctccgttcgagtgaattacc

SEQ ID NO: 3105 - DNA, 23 bp, Artificial Sequence
  Description of Artificial Sequence: Synthetic primer
  Description of Combined DNA/RNA Molecule: Synthetic primer
cgttcgtgggtggagttcgtttc

SEQ ID NO: 3106 - DNA, 35 bp, Artificial Sequence
  Description of Artificial Sequence: Synthetic primer
  Description of Combined DNA/RNA Molecule: Synthetic primer
ggtgtcgtgggcaaatccaaaacctccgaacgctg

SEQ ID NO: 3107 - DNA, 50 bp, Artificial Sequence
  Description of Artificial Sequence: Synthetic oligonucleotide
  Description of Combined DNA/RNA Molecule: Synthetic oligonucleotide
tttcgctcgacgcataccagggtggagttcgttttttggttggtcgtaca

SEQ ID NO: 3108 - DNA, 61 bp, Artificial Sequence
  Description of Artificial Sequence: Synthetic oligonucleotide
gtatggtgttcgtacggttttttttttttttttagcgtttagtggcgcggctactgtaaaa

SEQ ID NO: 3109 - DNA, 44 bp, Artificial Sequence
  Description of Artificial Sequence: Synthetic probe
aagttggtcgtatggtgttcgtacggttttttttttttttttag

SEQ ID NO: 3110 - DNA, 19 bp, Artificial Sequence
  Description of Artificial Sequence: Synthetic primer
tttcgctcgacgcatacca

SEQ ID NO: 3111 - DNA, 19 bp, Artificial Sequence
  Description of Artificial Sequence: Synthetic primer
ttttacagtagccgcgcca

SEQ ID NO: 3112 - DNA, 48 bp, Artificial Sequence
  Description of Artificial Sequence: Synthetic primer
  Description of Combined DNA/RNA Molecule: Synthetic primer
ttttacagtagccgcgccatccaaaacctccgaacgctaaatgctaag

SEQ ID NO: 3113 - DNA, 22 bp, Artificial Sequence
  Description of Artificial Sequence: Synthetic primer
  Description of Combined DNA/RNA Molecule: Synthetic primer
gggtgtcgtagtagggcgttgg

SEQ ID NO: 3114 - DNA, 42 bp, Artificial Sequence
  Description of Artificial Sequence: Synthetic primer
  Description of Combined DNA/RNA Molecule: Synthetic primer
ggtgtcgtggcctctacccaaaaaacaaaaaatcgtaaacgc

SEQ ID NO: 3115 - DNA, 47 bp, Artificial Sequence
  Description of Artificial Sequence: Synthetic oligonucleotide
  Description of Combined DNA/RNA Molecule: Synthetic oligonucleotide
ttcttgcccgcttgttccagtagggcgttgacgagtttcatcgagcc

SEQ ID NO: 3116 - DNA, 54 bp, Artificial Sequence
  Description of Artificial Sequence: Synthetic oligonucleotide
gagtttcgtcgttcgggtttaaggtcgtttttacgtggcgcggctactgtaaaa

SEQ ID NO: 3117 - DNA, 35 bp, Artificial Sequence
  Description of Artificial Sequence: Synthetic probe
cctttcatcgagtttcgtcgttcgggtttaaggtc

SEQ ID NO: 3118 - DNA, 19 bp, Artificial Sequence
  Description of Artificial Sequence: Synthetic primer
ttcttgcccgcttgttcca

SEQ ID NO: 3119 - DNA, 19 bp, Artificial Sequence
  Description of Artificial Sequence: Synthetic primer
ttttacagtagccgcgcca

SEQ ID NO: 3120 - DNA, 55 bp, Artificial Sequence
  Description of Artificial Sequence: Synthetic primer
  Description of Combined DNA/RNA Molecule: Synthetic primer
ttttacagtagccgcgccacctctacccaaaaaacaaaaaatcgtaaatguaaag

SEQ ID NO: 3121 - DNA, 31 bp, Artificial Sequence
  Description of Artificial Sequence: Synthetic primer
  Description of Combined DNA/RNA Molecule: Synthetic primer
ttttgggtattggtttttgatttttcgttac

SEQ ID NO: 3122 - DNA, 34 bp, Artificial Sequence
  Description of Artificial Sequence: Synthetic primer
  Description of Combined DNA/RNA Molecule: Synthetic primer
ggtgtcgtggccattaacacctacgccgcctacg

SEQ ID NO: 3123 - DNA, 49 bp, Artificial Sequence
  Description of Artificial Sequence: Synthetic oligonucleotide
  Description of Combined DNA/RNA Molecule: Synthetic oligonucleotide
tcccttagagagaacgcccaggaagatttttttgaggtcgaagcgttat

SEQ ID NO: 3124 - DNA, 68 bp, Artificial Sequence
  Description of Artificial Sequence: Synthetic oligonucleotide
gtttatttttagttagttttcgtagtggacgtagttttcgatgtagtggtgacgtacgagtgttctta

SEQ ID NO: 3125 - DNA, 40 bp, Artificial Sequence
  Description of Artificial Sequence: Synthetic probe
aatcgaagcgtttatttttagttagttttcgtagtggacg

SEQ ID NO: 3126 - DNA, 20 bp, Artificial Sequence
  Description of Artificial Sequence: Synthetic primer
tcccttagagagaacgccca

SEQ ID NO: 3127 - DNA, 22 bp, Artificial Sequence
  Description of Artificial Sequence: Synthetic primer
taagaacactcgtacgtcacca

SEQ ID NO: 3128 - DNA, 47 bp, Artificial Sequence
  Description of Artificial Sequence: Synthetic primer
  Description of Combined DNA/RNA Molecule: Synthetic primer
taagaacactcgtacgtcaccacacctacgccgcctacattgaaaat

SEQ ID NO: 3129 - DNA, 30 bp, Artificial Sequence
  Description of Artificial Sequence: Synthetic primer
  Description of Combined DNA/RNA Molecule: Synthetic primer
cgtatagtacggttgtttttatgtcgaaac

SEQ ID NO: 3130 - DNA, 32 bp, Artificial Sequence
  Description of Artificial Sequence: Synthetic primer
  Description of Combined DNA/RNA Molecule: Synthetic primer
ggtgtcgtggacttcttcccccaccgcutcac

SEQ ID NO: 3131 - DNA, 51 bp, Artificial Sequence
  Description of Artificial Sequence: Synthetic oligonucleotide
  Description of Combined DNA/RNA Molecule: Synthetic oligonucleotide
tctcataccagacgcggtaacggtattgggatgtcgggtttttcgcgagct

SEQ ID NO: 3132 - DNA, 49 bp, Artificial Sequence
  Description of Artificial Sequence: Synthetic oligonucleotide
gagtcgggagtggagaagtaacgaggataggttcgtgtcgctgtgctta

SEQ ID NO: 3133 - DNA, 24 bp, Artificial Sequence
  Description of Artificial Sequence: Synthetic probe
aattttcgcgagtcgggagtggag

SEQ ID NO: 3134 - DNA, 21 bp, Artificial Sequence
  Description of Artificial Sequence: Synthetic primer
tctcataccagacgcggtaac

SEQ ID NO: 3135 - DNA, 19 bp, Artificial Sequence
  Description of Artificial Sequence: Synthetic primer
taagcacagcgacacgaac

SEQ ID NO: 3136 - DNA, 47 bp, Artificial Sequence
  Description of Artificial Sequence: Synthetic primer
  Description of Combined DNA/RNA Molecule: Synthetic primer
taagcacagcgacacgaaccccaccgcttcattctatccttgutacc

SEQ ID NO: 3137 - DNA, 31 bp, Artificial Sequence
  Description of Artificial Sequence: Synthetic primer
  Description of Combined DNA/RNA Molecule: Synthetic primer
attaggtttatttgacgttttaggtcgataa

SEQ ID NO: 3138 - DNA, 37 bp, Artificial Sequence
  Description of Artificial Sequence: Synthetic primer
  Description of Combined DNA/RNA Molecule: Synthetic primer
ggtgtcgtggctaatcccgaaacaaaaaacgcctaag

SEQ ID NO: 3139 - DNA, 54 bp, Artificial Sequence
  Description of Artificial Sequence: Synthetic oligonucleotide
  Description of Combined DNA/RNA Molecule: Synthetic oligonucleotide
ttttcggcggcagctaaacgacgttttaggtcgatagtaaatttcgcgcgttct

SEQ ID NO: 3140 - DNA, 55 bp, Artificial Sequence
  Description of Artificial Sequence: Synthetic oligonucleotide
gtttcgttggttcggttacgttcgtagtttgtttaggttcgtgtcgctgtgctta

SEQ ID NO: 3141 - DNA, 24 bp, Artificial Sequence
  Description of Artificial Sequence: Synthetic probe
ccttcgcgcgtttcgttggttcgg

SEQ ID NO: 3142 - DNA, 19 bp, Artificial Sequence
  Description of Artificial Sequence: Synthetic primer
ttttcggcggcagctaaac

SEQ ID NO: 3143 - DNA, 19 bp, Artificial Sequence
  Description of Artificial Sequence: Synthetic primer
taagcacagcgacacgaac

SEQ ID NO: 3144 - DNA, 52 bp, Artificial Sequence
  Description of Artificial Sequence: Synthetic primer
  Description of Combined DNA/RNA Molecule: Synthetic primer
taagcacagcgacacgaaccaaaaaacgcctaaacaaactacgaatguaact

SEQ ID NO: 3145 - DNA, 34 bp, Artificial Sequence
  Description of Artificial Sequence: Synthetic primer
  Description of Combined DNA/RNA Molecule: Synthetic primer
tttgaagaagatatacgggttatgatttcgttgc

SEQ ID NO: 3146 - DNA, 31 bp, Artificial Sequence
  Description of Artificial Sequence: Synthetic primer
  Description of Combined DNA/RNA Molecule: Synthetic primer
ggtgtcgtggcgaaccccctaccgaccgcgg

SEQ ID NO: 3147 - DNA, 59 bp, Artificial Sequence
  Description of Artificial Sequence: Synthetic oligonucleotide
  Description of Combined DNA/RNA Molecule: Synthetic oligonucleotide
tccggaccttcatcctccagaagatatacgggttatgatttcgttgttgttgtcgagta

SEQ ID NO: 3148 - DNA, 52 bp, Artificial Sequence
  Description of Artificial Sequence: Synthetic oligonucleotide
gagcgtttcgtttatcgcgtttttcgattcgctgggcaggaacacgatagta

SEQ ID NO: 3149 - DNA, 28 bp, Artificial Sequence
  Description of Artificial Sequence: Synthetic probe
aatgttgtcgagcgtttcgtttatcgcg

SEQ ID NO: 3150 - DNA, 19 bp, Artificial Sequence
  Description of Artificial Sequence: Synthetic primer
tccggaccttcatcctcca

SEQ ID NO: 3151 - DNA, 20 bp, Artificial Sequence
  Description of Artificial Sequence: Synthetic primer
tactatcgtgttcctgccca

SEQ ID NO: 3152 - DNA, 44 bp, Artificial Sequence
  Description of Artificial Sequence: Synthetic primer
  Description of Combined DNA/RNA Molecule: Synthetic primer
tactatcgtgttcctgcccaccctaccgaccgcgaattgaaaag

SEQ ID NO: 3153 - DNA, 26 bp, Artificial Sequence
  Description of Artificial Sequence: Synthetic primer
  Description of Combined DNA/RNA Molecule: Synthetic primer
gaaggacggtttaggaggttcgtaga

SEQ ID NO: 3154 - DNA, 36 bp, Artificial Sequence
  Description of Artificial Sequence: Synthetic primer
  Description of Combined DNA/RNA Molecule: Synthetic primer
ggtgtcgtggaaaaccgccaacactaaaacccccca

SEQ ID NO: 3155 - DNA, 48 bp, Artificial Sequence
  Description of Artificial Sequence: Synthetic oligonucleotide
  Description of Combined DNA/RNA Molecule: Synthetic oligonucleotide
ttagccgccaaacgtaccaggttcgtagaggtgcggtattgtcggtga

SEQ ID NO: 3156 - DNA, 59 bp, Artificial Sequence
  Description of Artificial Sequence: Synthetic oligonucleotide
ggtagaaaatttttgatgaaaacggaagtgtagtgagtctgggcaggaacacgatagta

SEQ ID NO: 3157 - DNA, 41 bp, Artificial Sequence
  Description of Artificial Sequence: Synthetic probe
tttattgtcggtagaaaatttttgatgaaaacggaagtgta

SEQ ID NO: 3158 - DNA, 19 bp, Artificial Sequence
  Description of Artificial Sequence: Synthetic primer
ttagccgccaaacgtacca

SEQ ID NO: 3159 - DNA, 20 bp, Artificial Sequence
  Description of Artificial Sequence: Synthetic primer
tactatcgtgttcctgccca

SEQ ID NO: 3160 - DNA, 45 bp, Artificial Sequence
  Description of Artificial Sequence: Synthetic primer
  Description of Combined DNA/RNA Molecule: Synthetic primer
tactatcgtgttcctgcccagccaacactaaaaccccctgcccca

SEQ ID NO: 3161 - DNA, 27 bp, Artificial Sequence
  Description of Artificial Sequence: Synthetic primer
  Description of Combined DNA/RNA Molecule: Synthetic primer
tcgagggattttaaagatcgtcgggtc

SEQ ID NO: 3162 - DNA, 38 bp, Artificial Sequence
  Description of Artificial Sequence: Synthetic primer
  Description of Combined DNA/RNA Molecule: Synthetic primer
ggtgtcgtggaactatcgaaattccgaatacgccccgt

SEQ ID NO: 3163 - DNA, 42 bp, Artificial Sequence
  Description of Artificial Sequence: Synthetic oligonucleotide
  Description of Combined DNA/RNA Molecule: Synthetic oligonucleotide
tagcagctgaacaacccaacggttgagggcgaggagcgggcc

SEQ ID NO: 3164 - DNA, 40 bp, Artificial Sequence
  Description of Artificial Sequence: Synthetic oligonucleotide
gggatatcggagtcgcgggcgttgtatggtcggcatgcta

SEQ ID NO: 3165 - DNA, 24 bp, Artificial Sequence
  Description of Artificial Sequence: Synthetic probe
ttgaggagcgggatatcggagtcg

SEQ ID NO: 3166 - DNA, 20 bp, Artificial Sequence
  Description of Artificial Sequence: Synthetic primer
tagcagctgaacaacccaac

SEQ ID NO: 3167 - DNA, 20 bp, Artificial Sequence
  Description of Artificial Sequence: Synthetic primer
tagcatgccgaccatacaac

SEQ ID NO: 3168 - DNA, 50 bp, Artificial Sequence
  Description of Artificial Sequence: Synthetic primer
  Description of Combined DNA/RNA Molecule: Synthetic primer
tagcatgccgaccatacaacctatcgaaattccgaatacgccctgcccgt

SEQ ID NO: 3169 - DNA, 25 bp, Artificial Sequence
  Description of Artificial Sequence: Synthetic primer
  Description of Combined DNA/RNA Molecule: Synthetic primer
cgggaaagcgaaattcgttcggttc

SEQ ID NO: 3170 - DNA, 46 bp, Artificial Sequence
  Description of Artificial Sequence: Synthetic primer
  Description of Combined DNA/RNA Molecule: Synthetic primer
ggtgtcgtggaaaaatcttacaaacaaaatattaacgaaaaatcca

SEQ ID NO: 3171 - DNA, 53 bp, Artificial Sequence
  Description of Artificial Sequence: Synthetic oligonucleotide
  Description of Combined DNA/RNA Molecule: Synthetic oligonucleotide
tctgcccttcgcttcgaacttcggtttatttaagtttcgttgtttagcgttcc

SEQ ID NO: 3172 - DNA, 50 bp, Artificial Sequence
  Description of Artificial Sequence: Synthetic oligonucleotide
gttttttagggtcgtttttgggaacgggcggttgtatggtcggcatgcta

SEQ ID NO: 3173 - DNA, 35 bp, Artificial Sequence
  Description of Artificial Sequence: Synthetic probe
aagtttagcgttttttagggtcgtttttgggaacg

SEQ ID NO: 3174 - DNA, 19 bp, Artificial Sequence
  Description of Artificial Sequence: Synthetic primer
tctgcccttcgcttcgaac

SEQ ID NO: 3175 - DNA, 20 bp, Artificial Sequence
  Description of Artificial Sequence: Synthetic primer
tagcatgccgaccatacaac

SEQ ID NO: 3176 - DNA, 61 bp, Artificial Sequence
  Description of Artificial Sequence: Synthetic primer
  Description of Combined DNA/RNA Molecule: Synthetic primer
tagcatgccgaccatacaacaaaaatcttacaaacaaaatattaacgaaaaatctgcccgc

SEQ ID NO: 3177 - DNA, 24 bp, Artificial Sequence
  Description of Artificial Sequence: Synthetic primer
  Description of Combined DNA/RNA Molecule: Synthetic primer
gttagcgtcgtcgtttgtcgggag

SEQ ID NO: 3178 - DNA, 38 bp, Artificial Sequence; identical to SEQ ID NO: 846
  Description of Artificial Sequence: Synthetic primer
  Description of Combined DNA/RNA Molecule: Synthetic primer

SEQ ID NO: 3179 - DNA, 47 bp, Artificial Sequence; identical to SEQ ID NO: 847
  Description of Artificial Sequence: Synthetic oligonucleotide
  Description of Combined DNA/RNA Molecule: Synthetic oligonucleotide

SEQ ID NO: 3180 - DNA, 54 bp, Artificial Sequence; identical to SEQ ID NO: 848
  Description of Artificial Sequence: Synthetic oligonucleotide

SEQ ID NO: 3181 - DNA, 33 bp, Artificial Sequence; identical to SEQ ID NO: 849
  Description of Artificial Sequence: Synthetic probe

SEQ ID NO: 3182 - DNA, 19 bp, Artificial Sequence
  Description of Artificial Sequence: Synthetic primer
ttgcaaaccacccggacaa

SEQ ID NO: 3183 - DNA, 20 bp, Artificial Sequence
  Description of Artificial Sequence: Synthetic primer
taggagtcgatgctgaccaa

SEQ ID NO: 3184 - DNA, 45 bp, Artificial Sequence; identical to SEQ ID NO: 852
  Description of Artificial Sequence: Synthetic primer
  Description of Combined DNA/RNA Molecule: Synthetic primer

SEQ ID NO: 3185 - DNA, 26 bp, Artificial Sequence
  Description of Artificial Sequence: Synthetic primer
  Description of Combined DNA/RNA Molecule: Synthetic primer
cgtgtatgtcggtgtttgtacgagga

SEQ ID NO: 3186 - DNA, 36 bp, Artificial Sequence; identical to SEQ ID NO: 854
  Description of Artificial Sequence: Synthetic primer
  Description of Combined DNA/RNA Molecule: Synthetic primer

SEQ ID NO: 3187 - DNA, 44 bp, Artificial Sequence; identical to SEQ ID NO: 855
  Description of Artificial Sequence: Synthetic oligonucleotide
  Description of Combined DNA/RNA Molecule: Synthetic oligonucleotide

SEQ ID NO: 3188 - DNA, 54 bp, Artificial Sequence; identical to SEQ ID NO: 856
  Description of Artificial Sequence: Synthetic oligonucleotide

SEQ ID NO: 3189 - DNA, 32 bp, Artificial Sequence; identical to SEQ ID NO: 857
  Description of Artificial Sequence: Synthetic probe

SEQ ID NO: 3190 - DNA, 21 bp, Artificial Sequence
  Description of Artificial Sequence: Synthetic primer
taagacgtatgctagcgccaa

SEQ ID NO: 3191 - DNA, 20 bp, Artificial Sequence
  Description of Artificial Sequence: Synthetic primer
taggagtcgatgctgaccaa

SEQ ID NO: 3192 - DNA, 46 bp, Artificial Sequence; identical to SEQ ID NO: 860
  Description of Artificial Sequence: Synthetic primer
  Description of Combined DNA/RNA Molecule: Synthetic primer

SEQ ID NO: 3193 - DNA, 22 bp, Artificial Sequence
  Description of Artificial Sequence: Synthetic primer
  Description of Combined DNA/RNA Molecule: Synthetic primer
gattacgtgggtcgcgcgattg

SEQ ID NO: 3194 - DNA, 36 bp, Artificial Sequence; identical to SEQ ID NO: 862
  Description of Artificial Sequence: Synthetic primer
  Description of Combined DNA/RNA Molecule: Synthetic primer

SEQ ID NO: 3195 - DNA, 41 bp, Artificial Sequence; identical to SEQ ID NO: 863
  Description of Artificial Sequence: Synthetic oligonucleotide
  Description of Combined DNA/RNA Molecule: Synthetic oligonucleotide

SEQ ID NO: 3196 - DNA, 39 bp, Artificial Sequence; identical to SEQ ID NO: 864
  Description of Artificial Sequence: Synthetic oligonucleotide

SEQ ID NO: 3197 - DNA, 21 bp, Artificial Sequence
  Description of Artificial Sequence: Synthetic probe
aagagcatcggcgaggagttg

SEQ ID NO: 3198 - DNA, 19 bp, Artificial Sequence
  Description of Artificial Sequence: Synthetic primer
tacatgccatcccacgaca

SEQ ID NO: 3199 - DNA, 19 bp, Artificial Sequence
  Description of Artificial Sequence: Synthetic primer
tagtaaccgctccgacaca

SEQ ID NO: 3200 - DNA, 45 bp, Artificial Sequence; identical to SEQ ID NO: 868
  Description of Artificial Sequence: Synthetic primer
  Description of Combined DNA/RNA Molecule: Synthetic primer

SEQ ID NO: 3201 - DNA, 25 bp, Artificial Sequence
  Description of Artificial Sequence: Synthetic primer
  Description of Combined DNA/RNA Molecule: Synthetic primer
ggtagttttttggcggttgcgttta

SEQ ID NO: 3202 - DNA, 33 bp, Artificial Sequence; identical to SEQ ID NO: 870
  Description of Artificial Sequence: Synthetic primer
  Description of Combined DNA/RNA Molecule: Synthetic primer

SEQ ID NO: 3203 - DNA, 58 bp, Artificial Sequence; identical to SEQ ID NO: 871
  Description of Artificial Sequence: Synthetic oligonucleotide
  Description of Combined DNA/RNA Molecule: Synthetic oligonucleotide

SEQ ID NO: 3204 - DNA, 47 bp, Artificial Sequence; identical to SEQ ID NO: 872
  Description of Artificial Sequence: Synthetic oligonucleotide

SEQ ID NO: 3205 - DNA, 31 bp, Artificial Sequence; identical to SEQ ID NO: 873
  Description of Artificial Sequence: Synthetic probe

SEQ ID NO: 3206 - DNA, 20 bp, Artificial Sequence
  Description of Artificial Sequence: Synthetic primer
tagggcgacagttaccacaa

SEQ ID NO: 3207 - DNA, 20 bp, Artificial Sequence
  Description of Artificial Sequence: Synthetic primer
tatacgagcgagacccacaa

SEQ ID NO: 3208 - DNA, 43 bp, Artificial Sequence; identical to SEQ ID NO: 876
  Description of Artificial Sequence: Synthetic primer
  Description of Combined DNA/RNA Molecule: Synthetic primer

SEQ ID NO: 3209 - DNA, 25 bp, Artificial Sequence
  Description of Artificial Sequence: Synthetic primer
  Description of Combined DNA/RNA Molecule: Synthetic primer
atttgttattcgcgtgcgtcgtttc

SEQ ID NO: 3210 - DNA, 42 bp, Artificial Sequence; identical to SEQ ID NO: 878
  Description of Artificial Sequence: Synthetic primer
  Description of Combined DNA/RNA Molecule: Synthetic primer

SEQ ID NO: 3211 - DNA, 66 bp, Artificial Sequence; identical to SEQ ID NO: 879
  Description of Artificial Sequence: Synthetic oligonucleotide
  Description of Combined DNA/RNA Molecule: Synthetic oligonucleotide

SEQ ID NO: 3212 - DNA, 59 bp, Artificial Sequence; identical to SEQ ID NO: 880
  Description of Artificial Sequence: Synthetic oligonucleotide

SEQ ID NO: 3213 - DNA, 36 bp, Artificial Sequence; identical to SEQ ID NO: 881
  Description of Artificial Sequence: Synthetic probe

SEQ ID NO: 3214 - DNA, 21 bp, Artificial Sequence
  Description of Artificial Sequence: Synthetic primer
tccgactttagtgcgtcacaa

SEQ ID NO: 3215 - DNA, 20 bp, Artificial Sequence
  Description of Artificial Sequence: Synthetic primer
tatacgagcgagacccacaa

SEQ ID NO: 3216 - DNA, 64 bp, Artificial Sequence; identical to SEQ ID NO: 884
  Description of Artificial Sequence: Synthetic primer
  Description of Combined DNA/RNA Molecule: Synthetic primer

SEQ ID NO: 3217 - DNA, 30 bp, Artificial Sequence; identical to SEQ ID NO: 885
  Description of Artificial Sequence: Synthetic primer
  Description of Combined DNA/RNA Molecule: Synthetic primer

SEQ ID NO: 3218 - DNA, 43 bp, Artificial Sequence; identical to SEQ ID NO: 886
  Description of Artificial Sequence: Synthetic primer
  Description of Combined DNA/RNA Molecule: Synthetic primer

SEQ ID NO: 3219 - DNA, 57 bp, Artificial Sequence; identical to SEQ ID NO: 887
  Description of Artificial Sequence: Synthetic oligonucleotide
  Description of Combined DNA/RNA Molecule: Synthetic oligonucleotide

SEQ ID NO: 3220 - DNA, 70 bp, Artificial Sequence; identical to SEQ ID NO: 888
  Description of Artificial Sequence: Synthetic oligonucleotide

SEQ ID NO: 3221 - DNA, 41 bp, Artificial Sequence; identical to SEQ ID NO: 889
  Description of Artificial Sequence: Synthetic probe

SEQ ID NO: 3222 - DNA, 21 bp, Artificial Sequence
  Description of Artificial Sequence: Synthetic primer
tcaaacaaaggcgaccacaac

SEQ ID NO: 3223 - DNA, 22 bp, Artificial Sequence
  Description of Artificial Sequence: Synthetic primer
tatgaactgcctatgcgacaac

SEQ ID NO: 3224 - DNA, 56 bp, Artificial Sequence; identical to SEQ ID NO: 892
  Description of Artificial Sequence: Synthetic primer
  Description of Combined DNA/RNA Molecule: Synthetic primer

SEQ ID NO: 3225 - DNA, 27 bp, Artificial Sequence
  Description of Artificial Sequence: Synthetic primer
  Description of Combined DNA/RNA Molecule: Synthetic primer
cgagttgtaaagttgttgtcgcggcgc

SEQ ID NO: 3226 - DNA, 36 bp, Artificial Sequence; identical to SEQ ID NO: 894
  Description of Artificial Sequence: Synthetic primer
  Description of Combined DNA/RNA Molecule: Synthetic primer

SEQ ID NO: 3227 - DNA, 44 bp, Artificial Sequence; identical to SEQ ID NO: 895
  Description of Artificial Sequence: Synthetic oligonucleotide
  Description of Combined DNA/RNA Molecule: Synthetic oligonucleotide

SEQ ID NO: 3228 - DNA, 55 bp, Artificial Sequence; identical to SEQ ID NO: 896
  Description of Artificial Sequence: Synthetic oligonucleotide

SEQ ID NO: 3229 - DNA, 27 bp, Artificial Sequence
  Description of Artificial Sequence: Synthetic probe
ttacggcgcgcgtttaatttttagcgg

SEQ ID NO: 3230 - DNA, 22 bp, Artificial Sequence
  Description of Artificial Sequence: Synthetic primer
taaacaatgagacccgctgaac

SEQ ID NO: 3231 - DNA, 22 bp, Artificial Sequence
  Description of Artificial Sequence: Synthetic primer
tatgaactgcctatgcgacaac

SEQ ID NO: 3232 - DNA, 48 bp, Artificial Sequence; identical to SEQ ID NO: 900
  Description of Artificial Sequence: Synthetic primer
  Description of Combined DNA/RNA Molecule: Synthetic primer

SEQ ID NO: 3233 - DNA, 19 bp, Artificial Sequence
  Description of Artificial Sequence: Synthetic primer
  Description of Combined DNA/RNA Molecule: Synthetic primer
atgtgcgggtcggcgggtc

SEQ ID NO: 3234 - DNA, 36 bp, Artificial Sequence; identical to SEQ ID NO: 910
  Description of Artificial Sequence: Synthetic primer
  Description of Combined DNA/RNA Molecule: Synthetic primer

SEQ ID NO: 3235 - DNA, 47 bp, Artificial Sequence; identical to SEQ ID NO: 911
  Description of Artificial Sequence: Synthetic oligonucleotide
  Description of Combined DNA/RNA Molecule: Synthetic oligonucleotide

SEQ ID NO: 3236 - DNA, 59 bp, Artificial Sequence; identical to SEQ ID NO: 912
  Description of Artificial Sequence: Synthetic oligonucleotide

SEQ ID NO: 3237 - DNA, 35 bp, Artificial Sequence; identical to SEQ ID NO: 913
  Description of Artificial Sequence: Synthetic probe

SEQ ID NO: 3238 - DNA, 21 bp, Artificial Sequence
  Description of Artificial Sequence: Synthetic primer
tcatcgccctcagatcttcca

SEQ ID NO: 3239 - DNA, 21 bp, Artificial Sequence
  Description of Artificial Sequence: Synthetic primer
tgccctccaatctatcctcca

SEQ ID NO: 3240 - DNA, 50 bp, Artificial Sequence; identical to SEQ ID NO: 916
  Description of Artificial Sequence: Synthetic primer
  Description of Combined DNA/RNA Molecule: Synthetic primer

SEQ ID NO: 3241 - DNA, 21 bp, Artificial Sequence
  Description of Artificial Sequence: Synthetic primer
  Description of Combined DNA/RNA Molecule: Synthetic primer
ggtaagatcgaggcgcgtttg

SEQ ID NO: 3242 - DNA, 34 bp, Artificial Sequence; identical to SEQ ID NO: 974
  Description of Artificial Sequence: Synthetic primer
  Description of Combined DNA/RNA Molecule: Synthetic primer

SEQ ID NO: 3243 - DNA, 48 bp, Artificial Sequence; identical to SEQ ID NO: 975
  Description of Artificial Sequence: Synthetic oligonucleotide
  Description of Combined DNA/RNA Molecule: Synthetic oligonucleotide

SEQ ID NO: 3244 - DNA, 59 bp, Artificial Sequence; identical to SEQ ID NO: 976
  Description of Artificial Sequence: Synthetic oligonucleotide

SEQ ID NO: 3245 - DNA, 37 bp, Artificial Sequence; identical to SEQ ID NO: 977
  Description of Artificial Sequence: Synthetic probe

SEQ ID NO: 3246 - DNA, 20 bp, Artificial Sequence
  Description of Artificial Sequence: Synthetic primer
tcgctcttcagcctcctaca

SEQ ID NO: 3247 - DNA, 22 bp, Artificial Sequence
  Description of Artificial Sequence: Synthetic primer
tccggcaataattcccagaaca

SEQ ID NO: 3248 - DNA, 49 bp, Artificial Sequence; identical to SEQ ID NO: 980
  Description of Artificial Sequence: Synthetic primer
  Description of Combined DNA/RNA Molecule: Synthetic primer

SEQ ID NO: 3249 - DNA, 23 bp, Artificial Sequence
  Description of Artificial Sequence: Synthetic primer
  Description of Combined DNA/RNA Molecule: Synthetic primer
cgggacgggtttttttgcggatc

SEQ ID NO: 3250 - DNA, 38 bp, Artificial Sequence; identical to SEQ ID NO: 998
  Description of Artificial Sequence: Synthetic primer
  Description of Combined DNA/RNA Molecule: Synthetic primer

SEQ ID NO: 3251 - DNA, 61 bp, Artificial Sequence; identical to SEQ ID NO: 999
  Description of Artificial Sequence: Synthetic oligonucleotide
  Description of Combined DNA/RNA Molecule: Synthetic oligonucleotide

SEQ ID NO: 3252 - DNA, 53 bp, Artificial Sequence; identical to SEQ ID NO: 1000
  Description of Artificial Sequence: Synthetic oligonucleotide

SEQ ID NO: 3253 - DNA, 33 bp, Artificial Sequence; identical to SEQ ID NO: 1001
  Description of Artificial Sequence: Synthetic probe

SEQ ID NO: 3254 - DNA, 21 bp, Artificial Sequence
  Description of Artificial Sequence: Synthetic primer
tcatctgttcgtcagggtcca

SEQ ID NO: 3255 - DNA, 20 bp, Artificial Sequence
  Description of Artificial Sequence: Synthetic primer
tcctccgggtaaagtcacca

SEQ ID NO: 3256 - DNA, 50 bp, Artificial Sequence; identical to SEQ ID NO: 1004
  Description of Artificial Sequence: Synthetic primer
  Description of Combined DNA/RNA Molecule: Synthetic primer

SEQ ID NO: 3257 - DNA, 22 bp, Artificial Sequence
  Description of Artificial Sequence: Synthetic primer
  Description of Combined DNA/RNA Molecule: Synthetic primer
cggatcgtaggttgggcggttc

SEQ ID NO: 3258 - DNA, 32 bp, Artificial Sequence; identical to SEQ ID NO: 1394
  Description of Artificial Sequence: Synthetic primer
  Description of Combined DNA/RNA Molecule: Synthetic primer

SEQ ID NO: 3259 - DNA, 49 bp, Artificial Sequence; identical to SEQ ID NO: 1395
  Description of Artificial Sequence: Synthetic oligonucleotide
  Description of Combined DNA/RNA Molecule: Synthetic oligonucleotide

SEQ ID NO: 3260 - DNA, 57 bp, Artificial Sequence; identical to SEQ ID NO: 1396
  Description of Artificial Sequence: Synthetic oligonucleotide

SEQ ID NO: 3261 - DNA, 41 bp, Artificial Sequence; identical to SEQ ID NO: 1397
  Description of Artificial Sequence: Synthetic probe

SEQ ID NO: 3262 - DNA, 20 bp, Artificial Sequence
  Description of Artificial Sequence: Synthetic primer
tcgcggaaagtcccagtaac

SEQ ID NO: 3263 - DNA, 20 bp, Artificial Sequence
  Description of Artificial Sequence: Synthetic primer
tggaacgcttacaggccaac

SEQ ID NO: 3264 - DNA, 50 bp, Artificial Sequence; identical to SEQ ID NO: 1400
  Description of Artificial Sequence: Synthetic primer
  Description of Combined DNA/RNA Molecule: Synthetic primer

SEQ ID NO: 3265 - DNA, 30 bp, Artificial Sequence; identical to SEQ ID NO: 1408
  Description of Artificial Sequence: Synthetic primer
  Description of Combined DNA/RNA Molecule: Synthetic primer

SEQ ID NO: 3266 - DNA, 32 bp, Artificial Sequence; identical to SEQ ID NO: 1409
  Description of Artificial Sequence: Synthetic primer
  Description of Combined DNA/RNA Molecule: Synthetic primer

SEQ ID NO: 3267 - DNA, 52 bp, Artificial Sequence; identical to SEQ ID NO: 1410
  Description of Artificial Sequence: Synthetic oligonucleotide
  Description of Combined DNA/RNA Molecule: Synthetic oligonucleotide

SEQ ID NO: 3268 - DNA, 50 bp, Artificial Sequence; identical to SEQ ID NO: 1411
  Description of Artificial Sequence: Synthetic oligonucleotide

SEQ ID NO: 3269 - DNA, 33 bp, Artificial Sequence; identical to SEQ ID NO: 1412
  Description of Artificial Sequence: Synthetic probe

SEQ ID NO: 3270 - DNA, 21 bp, Artificial Sequence
  Description of Artificial Sequence: Synthetic primer
tacacgtggatatctccgacc

SEQ ID NO: 3271 - DNA, 21 bp, Artificial Sequence
  Description of Artificial Sequence: Synthetic primer
tggaactgtgtgactagcacc

SEQ ID NO: 3272 - DNA, 47 bp, Artificial Sequence; identical to SEQ ID NO: 1415
  Description of Artificial Sequence: Synthetic primer
  Description of Combined DNA/RNA Molecule: Synthetic primer

SEQ ID NO: 3273 - DNA, 30 bp, Artificial Sequence; identical to SEQ ID NO: 1416
  Description of Artificial Sequence: Synthetic primer
  Description of Combined DNA/RNA Molecule: Synthetic primer

SEQ ID NO: 3274 - DNA, 32 bp, Artificial Sequence; identical to SEQ ID NO: 1417
  Description of Artificial Sequence: Synthetic primer
  Description of Combined DNA/RNA Molecule: Synthetic primer

SEQ ID NO: 3275 - DNA, 54 bp, Artificial Sequence; identical to SEQ ID NO: 1418
  Description of Artificial Sequence: Synthetic oligonucleotide
  Description of Combined DNA/RNA Molecule: Synthetic oligonucleotide

SEQ ID NO: 3276 - DNA, 57 bp, Artificial Sequence; identical to SEQ ID NO: 1419
  Description of Artificial Sequence: Synthetic oligonucleotide

SEQ ID NO: 3277 - DNA, 40 bp, Artificial Sequence; identical to SEQ ID NO: 1420
  Description of Artificial Sequence: Synthetic probe

SEQ ID NO: 3278 - DNA, 19 bp, Artificial Sequence
  Description of Artificial Sequence: Synthetic primer
tagcattcgagaacgcacc

SEQ ID NO: 3279 - DNA, 21 bp, Artificial Sequence
  Description of Artificial Sequence: Synthetic primer
tggaactgtgtgactagcacc

SEQ ID NO: 3280 - DNA, 50 bp, Artificial Sequence; identical to SEQ ID NO: 1423
  Description of Artificial Sequence: Synthetic primer
  Description of Combined DNA/RNA Molecule: Synthetic primer

SEQ ID NO: 3281 - DNA, 24 bp, Artificial Sequence
  Description of Artificial Sequence: Synthetic primer
  Description of Combined DNA/RNA Molecule: Synthetic primer
gtttgtgtagggcgaggacgggat

SEQ ID NO: 3282 - DNA, 36 bp, Artificial Sequence; identical to SEQ ID NO: 1425
  Description of Artificial Sequence: Synthetic primer
  Description of Combined DNA/RNA Molecule: Synthetic primer

SEQ ID NO: 3283 - DNA, 43 bp, Artificial Sequence; identical to SEQ ID NO: 1426
  Description of Artificial Sequence: Synthetic oligonucleotide
  Description of Combined DNA/RNA Molecule: Synthetic oligonucleotide

SEQ ID NO: 3284 - DNA, 65 bp, Artificial Sequence; identical to SEQ ID NO: 1427
  Description of Artificial Sequence: Synthetic oligonucleotide

SEQ ID NO: 3285 - DNA, 28 bp, Artificial Sequence
  Description of Artificial Sequence: Synthetic probe
aatgcgctcggttaggttggttttcgag

SEQ ID NO: 3286 - DNA, 20 bp, Artificial Sequence
  Description of Artificial Sequence: Synthetic primer
taaccgggcctaaagtgaca

SEQ ID NO: 3287 - DNA, 22 bp, Artificial Sequence
  Description of Artificial Sequence: Synthetic primer
tggagagggagatcacgtaaca

SEQ ID NO: 3288 - DNA, 62 bp, Artificial Sequence; identical to SEQ ID NO: 1431
  Description of Artificial Sequence: Synthetic primer
  Description of Combined DNA/RNA Molecule: Synthetic primer

SEQ ID NO: 3289 - DNA, 26 bp, Artificial Sequence
  Description of Artificial Sequence: Synthetic primer
  Description of Combined DNA/RNA Molecule: Synthetic primer
gggtttcgattcgaataaggcggtgc

SEQ ID NO: 3290 - DNA, 35 bp, Artificial Sequence; identical to SEQ ID NO: 1433
  Description of Artificial Sequence: Synthetic primer
  Description of Combined DNA/RNA Molecule: Synthetic primer

SEQ ID NO: 3291 - DNA, 45 bp, Artificial Sequence; identical to SEQ ID NO: 1434
  Description of Artificial Sequence: Synthetic oligonucleotide
  Description of Combined DNA/RNA Molecule: Synthetic oligonucleotide

SEQ ID NO: 3292 - DNA, 37 bp, Artificial Sequence; identical to SEQ ID NO: 1435
  Description of Artificial Sequence: Synthetic oligonucleotide

SEQ ID NO: 3293 - DNA, 19 bp, Artificial Sequence
  Description of Artificial Sequence: Synthetic probe
tttcgtagcgcgggagcgg

SEQ ID NO: 3294 - DNA, 22 bp, Artificial Sequence
  Description of Artificial Sequence: Synthetic primer
tcgatggtcaatgagcttcaca

SEQ ID NO: 3295 - DNA, 22 bp, Artificial Sequence
  Description of Artificial Sequence: Synthetic primer
tggagagggagatcacgtaaca

SEQ ID NO: 3296 - DNA, 44 bp, Artificial Sequence; identical to SEQ ID NO: 1439
  Description of Artificial Sequence: Synthetic primer
  Description of Combined DNA/RNA Molecule: Synthetic primer

SEQ ID NO: 3297 - DNA, 31 bp, Artificial Sequence; identical to SEQ ID NO: 1488
  Description of Artificial Sequence: Synthetic primer
  Description of Combined DNA/RNA Molecule: Synthetic primer

SEQ ID NO: 3298 - DNA, 39 bp, Artificial Sequence; identical to SEQ ID NO: 1489
  Description of Artificial Sequence: Synthetic primer
  Description of Combined DNA/RNA Molecule: Synthetic primer

SEQ ID NO: 3299 - DNA, 68 bp, Artificial Sequence; identical to SEQ ID NO: 1490
  Description of Artificial Sequence: Synthetic oligonucleotide
  Description of Combined DNA/RNA Molecule: Synthetic oligonucleotide

SEQ ID NO: 3300 - DNA, 53 bp, Artificial Sequence; identical to SEQ ID NO: 1491
  Description of Artificial Sequence: Synthetic oligonucleotide

SEQ ID NO: 3301 - DNA, 28 bp, Artificial Sequence
  Description of Artificial Sequence: Synthetic probe
cccgttctcggtagtcgttttacgcggg

SEQ ID NO: 3302 - DNA, 19 bp, Artificial Sequence
  Description of Artificial Sequence: Synthetic primer
ttcgtccctgcacgctaac

SEQ ID NO: 3303 - DNA, 20 bp, Artificial Sequence
  Description of Artificial Sequence: Synthetic primer
tggcctaacggtgatggaac

SEQ ID NO: 3304 - DNA, 60 bp, Artificial Sequence; identical to SEQ ID NO: 1495
  Description of Artificial Sequence: Synthetic primer
  Description of Combined DNA/RNA Molecule: Synthetic primer

SEQ ID NO: 3305 - DNA, 35 bp, Artificial Sequence; identical to SEQ ID NO: 1496
  Description of Artificial Sequence: Synthetic primer
  Description of Combined DNA/RNA Molecule: Synthetic primer

SEQ ID NO: 3306 - DNA, 39 bp, Artificial Sequence; identical to SEQ ID NO: 1497
  Description of Artificial Sequence: Synthetic primer
  Description of Combined DNA/RNA Molecule: Synthetic primer

SEQ ID NO: 3307 - DNA, 62 bp, Artificial Sequence; identical to SEQ ID NO: 1498
  Description of Artificial Sequence: Synthetic oligonucleotide
  Description of Combined DNA/RNA Molecule: Synthetic oligonucleotide

SEQ ID NO: 3308 - DNA, 67 bp, Artificial Sequence; identical to SEQ ID NO: 1499
  Description of Artificial Sequence: Synthetic oligonucleotide

SEQ ID NO: 3309 - DNA, 44 bp, Artificial Sequence; identical to SEQ ID NO: 1500
  Description of Artificial Sequence: Synthetic probe

SEQ ID NO: 3310 - DNA, 22 bp, Artificial Sequence
  Description of Artificial Sequence: Synthetic primer
tgatgctggcaaaccctagaac

SEQ ID NO: 3311 - DNA, 20 bp, Artificial Sequence
  Description of Artificial Sequence: Synthetic primer
tggcctaacggtgatggaac

SEQ ID NO: 3312 - DNA, 21 bp, Artificial Sequence
  Description of Artificial Sequence: Synthetic primer
  Description of Combined DNA/RNA Molecule: Synthetic primer
gtcgggttcgcgtagcgttgc

SEQ ID NO: 3313 - DNA, 30 bp, Artificial Sequence; identical to SEQ ID NO: 1520
  Description of Artificial Sequence: Synthetic primer
  Description of Combined DNA/RNA Molecule: Synthetic primer

SEQ ID NO: 3314 - DNA, 47 bp, Artificial Sequence; identical to SEQ ID NO: 1521
  Description of Artificial Sequence: Synthetic oligonucleotide
  Description of Combined DNA/RNA Molecule: Synthetic oligonucleotide

SEQ ID NO: 3315 - DNA, 62 bp, Artificial Sequence; identical to SEQ ID NO: 1522
  Description of Artificial Sequence: Synthetic oligonucleotide

SEQ ID NO: 3316 - DNA, 43 bp, Artificial Sequence; identical to SEQ ID NO: 1523
  Description of Artificial Sequence: Synthetic probe

SEQ ID NO: 3317 - DNA, 20 bp, Artificial Sequence
  Description of Artificial Sequence: Synthetic primer
tccgggtatacactgtccca

SEQ ID NO: 3318 - DNA, 21 bp, Artificial Sequence
  Description of Artificial Sequence: Synthetic primer
tggcctgtcctctgttaacca

SEQ ID NO: 3319 - DNA, 49 bp, Artificial Sequence; identical to SEQ ID NO: 1526
  Description of Artificial Sequence: Synthetic primer
  Description of Combined DNA/RNA Molecule: Synthetic primer

SEQ ID NO: 3320 - DNA, 22 bp, Artificial Sequence
  Description of Artificial Sequence: Synthetic primer
  Description of Combined DNA/RNA Molecule: Synthetic primer
tttgggttaacggaggcgagga

SEQ ID NO: 3321 - DNA, 31 bp, Artificial Sequence; identical to SEQ ID NO: 1632
  Description of Artificial Sequence: Synthetic primer
  Description of Combined DNA/RNA Molecule: Synthetic primer

SEQ ID NO: 3322 - DNA, 41 bp, Artificial Sequence; identical to SEQ ID NO: 1633
  Description of Artificial Sequence: Synthetic oligonucleotide
  Description of Combined DNA/RNA Molecule: Synthetic oligonucleotide

SEQ ID NO: 3323 - DNA, 62 bp, Artificial Sequence; identical to SEQ ID NO: 1634
  Description of Artificial Sequence: Synthetic oligonucleotide

SEQ ID NO: 3324 - DNA, 37 bp, Artificial Sequence; identical to SEQ ID NO: 1635
  Description of Artificial Sequence: Synthetic probe

SEQ ID NO: 3325 - DNA, 20 bp, Artificial Sequence
  Description of Artificial Sequence: Synthetic primer
tatagtcacgcaggaccaca

SEQ ID NO: 3326 - DNA, 21 bp, Artificial Sequence
  Description of Artificial Sequence: Synthetic primer
tgtcatagacagccgcaaaca

SEQ ID NO: 3327 - DNA, 48 bp, Artificial Sequence; identical to SEQ ID NO: 1638
  Description of Artificial Sequence: Synthetic primer
  Description of Combined DNA/RNA Molecule: Synthetic primer

SEQ ID NO: 3328 - DNA, 23 bp, Artificial Sequence
  Description of Artificial Sequence: Synthetic primer
  Description of Combined DNA/RNA Molecule: Synthetic primer
tcggttattcgtgcggtcggatg

SEQ ID NO: 3329 - DNA, 36 bp, Artificial Sequence; identical to SEQ ID NO: 1640
  Description of Artificial Sequence: Synthetic primer
  Description of Combined DNA/RNA Molecule: Synthetic primer

SEQ ID NO: 3330 - DNA, 51 bp, Artificial Sequence; identical to SEQ ID NO: 1641
  Description of Artificial Sequence: Synthetic oligonucleotide
  Description of Combined DNA/RNA Molecule: Synthetic oligonucleotide

SEQ ID NO: 3331 - DNA, 53 bp, Artificial Sequence; identical to SEQ ID NO: 1642
  Description of Artificial Sequence: Synthetic oligonucleotide

SEQ ID NO: 3332 - DNA, 31 bp, Artificial Sequence; identical to SEQ ID NO: 1643
  Description of Artificial Sequence: Synthetic probe

SEQ ID NO: 3333 - DNA, 22 bp, Artificial Sequence
  Description of Artificial Sequence: Synthetic primer
tgccctatcgaaaaggacaaca

SEQ ID NO: 3334 - DNA, 21 bp, Artificial Sequence
  Description of Artificial Sequence: Synthetic primer
tgtcatagacagccgcaaaca

SEQ ID NO: 3335 - DNA, 56 bp, Artificial Sequence; identical to SEQ ID NO: 1646
  Description of Artificial Sequence: Synthetic primer
  Description of Combined DNA/RNA Molecule: Synthetic primer

SEQ ID NO: 3336 - DNA, 22 bp, Artificial Sequence
  Description of Artificial Sequence: Synthetic primer
  Description of Combined DNA/RNA Molecule: Synthetic primer
gggttcgggaagttcgcggaag

SEQ ID NO: 3337 - DNA, 39 bp, Artificial Sequence; identical to SEQ ID NO: 1648
  Description of Artificial Sequence: Synthetic primer
  Description of Combined DNA/RNA Molecule: Synthetic primer

SEQ ID NO: 3338 - DNA, 47 bp, Artificial Sequence; identical to SEQ ID NO: 1649
  Description of Artificial Sequence: Synthetic oligonucleotide
  Description of Combined DNA/RNA Molecule: Synthetic oligonucleotide

SEQ ID NO: 3339 - DNA, 60 bp, Artificial Sequence; identical to SEQ ID NO: 1650
  Description of Artificial Sequence: Synthetic oligonucleotide

SEQ ID NO: 3340 - DNA, 30 bp, Artificial Sequence; identical to SEQ ID NO: 1651
  Description of Artificial Sequence: Synthetic probe

SEQ ID NO: 3341 - DNA, 21 bp, Artificial Sequence
  Description of Artificial Sequence: Synthetic primer
taatctccagacctccgaacc

SEQ ID NO: 3342 - DNA, 22 bp, Artificial Sequence
  Description of Artificial Sequence: Synthetic primer
tgtcccgttcaatccttacatc

SEQ ID NO: 3343 - DNA, 27 bp, Artificial Sequence
  Description of Artificial Sequence: Synthetic primer
  Description of Combined DNA/RNA Molecule: Synthetic primer
tttcgtttttgtcggcggtagcgattt

SEQ ID NO: 3344 - DNA, 30 bp, Artificial Sequence; identical to SEQ ID NO: 1655
  Description of Artificial Sequence: Synthetic primer
  Description of Combined DNA/RNA Molecule: Synthetic primer

SEQ ID NO: 3345 - DNA, 46 bp, Artificial Sequence; identical to SEQ ID NO: 1656
  Description of Artificial Sequence: Synthetic oligonucleotide
  Description of Combined DNA/RNA Molecule: Synthetic oligonucleotide

SEQ ID NO: 3346 - DNA, 63 bp, Artificial Sequence; identical to SEQ ID NO: 1657
  Description of Artificial Sequence: Synthetic oligonucleotide

SEQ ID NO: 3347 - DNA, 46 bp, Artificial Sequence; identical to SEQ ID NO: 1658
  Description of Artificial Sequence: Synthetic probe

SEQ ID NO: 3348 - DNA, 19 bp, Artificial Sequence
  Description of Artificial Sequence: Synthetic primer
ttttccgcgtcagagcaca

SEQ ID NO: 3349 - DNA, 22 bp, Artificial Sequence
  Description of Artificial Sequence: Synthetic primer
tgtcgagctaggtccgataaca

SEQ ID NO: 3350 - DNA, 44 bp, Artificial Sequence; identical to SEQ ID NO: 1661
  Description of Artificial Sequence: Synthetic primer
  Description of Combined DNA/RNA Molecule: Synthetic primer

SEQ ID NO: 3351 - DNA, 35 bp, Artificial Sequence; identical to SEQ ID NO: 1662
  Description of Artificial Sequence: Synthetic primer
  Description of Combined DNA/RNA Molecule: Synthetic primer

SEQ ID NO: 3352 - DNA, 30 bp, Artificial Sequence; identical to SEQ ID NO: 1663
  Description of Artificial Sequence: Synthetic primer
  Description of Combined DNA/RNA Molecule: Synthetic primer

SEQ ID NO: 3353 - DNA, 42 bp, Artificial Sequence; identical to SEQ ID NO: 1664
  Description of Artificial Sequence: Synthetic oligonucleotide
  Description of Combined DNA/RNA Molecule: Synthetic oligonucleotide

SEQ ID NO: 3354 - DNA, 55 bp, Artificial Sequence; identical to SEQ ID NO: 1665
  Description of Artificial Sequence: Synthetic oligonucleotide

SEQ ID NO: 3355 - DNA, 34 bp, Artificial Sequence; identical to SEQ ID NO: 1666
  Description of Artificial Sequence: Synthetic probe

SEQ ID NO: 3356 - DNA, 19 bp, Artificial Sequence
  Description of Artificial Sequence: Synthetic primer
ttcgctgcccggttaaaca

SEQ ID NO: 3357 - DNA, 22 bp, Artificial Sequence
  Description of Artificial Sequence: Synthetic primer
tgtcgagctaggtccgataaca

SEQ ID NO: 3358 - DNA, 42 bp, Artificial Sequence; identical to SEQ ID NO: 1669
  Description of Artificial Sequence: Synthetic primer
  Description of Combined DNA/RNA Molecule: Synthetic primer

SEQ ID NO: 3359 - DNA, 25 bp, Artificial Sequence
  Description of Artificial Sequence: Synthetic primer
  Description of Combined DNA/RNA Molecule: Synthetic primer
cgacgtgtttcgttgaaagcgggtg

SEQ ID NO: 3360 - DNA, 31 bp, Artificial Sequence; identical to SEQ ID NO: 1671
  Description of Artificial Sequence: Synthetic primer
  Description of Combined DNA/RNA Molecule: Synthetic primer

SEQ ID NO: 3361 - DNA, 45 bp, Artificial Sequence; identical to SEQ ID NO: 1672
  Description of Artificial Sequence: Synthetic oligonucleotide
  Description of Combined DNA/RNA Molecule: Synthetic oligonucleotide

SEQ ID NO: 3362 - DNA, 41 bp, Artificial Sequence; identical to SEQ ID NO: 1673
  Description of Artificial Sequence: Synthetic oligonucleotide

SEQ ID NO: 3363 - DNA, 22 bp, Artificial Sequence
  Description of Artificial Sequence: Synthetic probe
tttggtatcgggcggagttgcg

SEQ ID NO: 3364 - DNA, 19 bp, Artificial Sequence
  Description of Artificial Sequence: Synthetic primer
ttcgctgcccggttaaaca

SEQ ID NO: 3365 - DNA, 22 bp, Artificial Sequence
  Description of Artificial Sequence: Synthetic primer
tgtcgagctaggtccgataaca

SEQ ID NO: 3366 - DNA, 52 bp, Artificial Sequence; identical to SEQ ID NO: 1677
  Description of Artificial Sequence: Synthetic primer
  Description of Combined DNA/RNA Molecule: Synthetic primer

SEQ ID NO: 3367 - DNA, 26 bp, Artificial Sequence
  Description of Artificial Sequence: Synthetic primer
  Description of Combined DNA/RNA Molecule: Synthetic primer
gtagaagtgattcgggttgtcgtttc

SEQ ID NO: 3368 - DNA, 30 bp, Artificial Sequence; identical to SEQ ID NO: 1695
  Description of Artificial Sequence: Synthetic primer
  Description of Combined DNA/RNA Molecule: Synthetic primer

SEQ ID NO: 3369 - DNA, 52 bp, Artificial Sequence; identical to SEQ ID NO: 1696
  Description of Artificial Sequence: Synthetic oligonucleotide
  Description of Combined DNA/RNA Molecule: Synthetic oligonucleotide

SEQ ID NO: 3370 - DNA, 55 bp, Artificial Sequence; identical to SEQ ID NO: 1697
  Description of Artificial Sequence: Synthetic oligonucleotide

SEQ ID NO: 3371 - DNA, 32 bp, Artificial Sequence; identical to SEQ ID NO: 1698
  Description of Artificial Sequence: Synthetic probe

SEQ ID NO: 3372 - DNA, 22 bp, Artificial Sequence
  Description of Artificial Sequence: Synthetic primer
tcctgctctgaaaacctacacc

SEQ ID NO: 3373 - DNA, 22 bp, Artificial Sequence
  Description of Artificial Sequence: Synthetic primer
tgtctaagccgcctatgtaacc

SEQ ID NO: 3374 - DNA, 54 bp, Artificial Sequence; identical to SEQ ID NO: 1701
  Description of Artificial Sequence: Synthetic primer
  Description of Combined DNA/RNA Molecule: Synthetic primer

SEQ ID NO: 3375 - DNA, 25 bp, Artificial Sequence
  Description of Artificial Sequence: Synthetic primer
  Description of Combined DNA/RNA Molecule: Synthetic primer
ttaagcgtagttggacgagcggtaa

SEQ ID NO: 3376 - DNA, 31 bp, Artificial Sequence; identical to SEQ ID NO: 1735
  Description of Artificial Sequence: Synthetic primer
  Description of Combined DNA/RNA Molecule: Synthetic primer

SEQ ID NO: 3377 - DNA, 44 bp, Artificial Sequence; identical to SEQ ID NO: 1736
  Description of Artificial Sequence: Synthetic oligonucleotide
  Description of Combined DNA/RNA Molecule: Synthetic oligonucleotide

SEQ ID NO: 3378 - DNA, 46 bp, Artificial Sequence; identical to SEQ ID NO: 1737
  Description of Artificial Sequence: Synthetic oligonucleotide

SEQ ID NO: 3379 - DNA, 30 bp, Artificial Sequence; identical to SEQ ID NO: 1738
  Description of Artificial Sequence: Synthetic probe

SEQ ID NO: 3380 - DNA, 19 bp, Artificial Sequence
  Description of Artificial Sequence: Synthetic primer
ttcgcctaccgcagtgaac

SEQ ID NO: 3381 - DNA, 19 bp, Artificial Sequence
  Description of Artificial Sequence: Synthetic primer
tgcgagcccatgtctcaac

SEQ ID NO: 3382 - DNA, 42 bp, Artificial Sequence; identical to SEQ ID NO: 1741
  Description of Artificial Sequence: Synthetic primer
  Description of Combined DNA/RNA Molecule: Synthetic primer

SEQ ID NO: 3383 - DNA, 27 bp, Artificial Sequence
  Description of Artificial Sequence: Synthetic primer
  Description of Combined DNA/RNA Molecule: Synthetic primer
tttttagtcgtgttcggttttcgtcgc

SEQ ID NO: 3384 - DNA, 30 bp, Artificial Sequence; identical to SEQ ID NO: 1767
  Description of Artificial Sequence: Synthetic primer
  Description of Combined DNA/RNA Molecule: Synthetic primer

SEQ ID NO: 3385 - DNA, 56 bp, Artificial Sequence; identical to SEQ ID NO: 1768
  Description of Artificial Sequence: Synthetic oligonucleotide
  Description of Combined DNA/RNA Molecule: Synthetic oligonucleotide

SEQ ID NO: 3386 - DNA, 53 bp, Artificial Sequence; identical to SEQ ID NO: 1769
  Description of Artificial Sequence: Synthetic oligonucleotide

SEQ ID NO: 3387 - DNA, 32 bp, Artificial Sequence; identical to SEQ ID NO: 1770
  Description of Artificial Sequence: Synthetic probe

SEQ ID NO: 3388 - DNA, 19 bp, Artificial Sequence
  Description of Artificial Sequence: Synthetic primer
tcctcgagccgatgacaca

SEQ ID NO: 3389 - DNA, 19 bp, Artificial Sequence
  Description of Artificial Sequence: Synthetic primer
ttagcccacggacgttaca

SEQ ID NO: 3390 - DNA, 49 bp, Artificial Sequence; identical to SEQ ID NO: 1773
  Description of Artificial Sequence: Synthetic primer
  Description of Combined DNA/RNA Molecule: Synthetic primer

SEQ ID NO: 3391 - DNA, 31 bp, Artificial Sequence; identical to SEQ ID NO: 1774
  Description of Artificial Sequence: Synthetic primer
  Description of Combined DNA/RNA Molecule: Synthetic primer

SEQ ID NO: 3392 - DNA, 42 bp, Artificial Sequence; identical to SEQ ID NO: 1775
  Description of Artificial Sequence: Synthetic primer
  Description of Combined DNA/RNA Molecule: Synthetic primer

SEQ ID NO: 3393 - DNA, 57 bp, Artificial Sequence; identical to SEQ ID NO: 1776
  Description of Artificial Sequence: Synthetic oligonucleotide
  Description of Combined DNA/RNA Molecule: Synthetic oligonucleotide

SEQ ID NO: 3394 - DNA, 52 bp, Artificial Sequence; identical to SEQ ID NO: 1777
  Description of Artificial Sequence: Synthetic oligonucleotide

SEQ ID NO: 3395 - DNA, 28 bp, Artificial Sequence
  Description of Artificial Sequence: Synthetic probe
tttacgcgcggcgtttagtttaggtttt

SEQ ID NO: 3396 - DNA, 21 bp, Artificial Sequence
  Description of Artificial Sequence: Synthetic primer
tactatcgtatcacgccgaca

SEQ ID NO: 3397 - DNA, 19 bp, Artificial Sequence
  Description of Artificial Sequence: Synthetic primer
ttagcccacggacgttaca

SEQ ID NO: 3398 - DNA, 52 bp, Artificial Sequence; identical to SEQ ID NO: 1781
  Description of Artificial Sequence: Synthetic primer
  Description of Combined DNA/RNA Molecule: Synthetic primer

SEQ ID NO: 3399 - DNA, 27 bp, Artificial Sequence
  Description of Artificial Sequence: Synthetic primer
  Description of Combined DNA/RNA Molecule: Synthetic primer
ggtttgtttttagttggcggtcggttc

SEQ ID NO: 3400 - DNA, 34 bp, Artificial Sequence; identical to SEQ ID NO: 2504
  Description of Artificial Sequence: Synthetic primer
  Description of Combined DNA/RNA Molecule: Synthetic primer

SEQ ID NO: 3401 - DNA, 53 bp, Artificial Sequence; identical to SEQ ID NO: 2505
  Description of Artificial Sequence: Synthetic oligonucleotide
  Description of Combined DNA/RNA Molecule: Synthetic oligonucleotide

SEQ ID NO: 3402 - DNA, 52 bp, Artificial Sequence; identical to SEQ ID NO: 2506
  Description of Artificial Sequence: Synthetic oligonucleotide

SEQ ID NO: 3403 - DNA, 31 bp, Artificial Sequence; identical to SEQ ID NO: 2507
  Description of Artificial Sequence: Synthetic probe

SEQ ID NO: 3404 - DNA, 20 bp, Artificial Sequence
  Description of Artificial Sequence: Synthetic primer
tcgtagactcgctatcgcca

SEQ ID NO: 3405 - DNA, 19 bp, Artificial Sequence
  Description of Artificial Sequence: Synthetic primer
tgctcatccctgctcacca

SEQ ID NO: 3406 - DNA, 55 bp, Artificial Sequence; identical to SEQ ID NO: 2510
  Description of Artificial Sequence: Synthetic primer
  Description of Combined DNA/RNA Molecule: Synthetic primer

SEQ ID NO: 3407 - DNA, 22 bp, Artificial Sequence
  Description of Artificial Sequence: Synthetic primer
  Description of Combined DNA/RNA Molecule: Synthetic primer
gtttttttggcgtgcgcgttgg

SEQ ID NO: 3408 - DNA, 32 bp, Artificial Sequence; identical to SEQ ID NO: 2560
  Description of Artificial Sequence: Synthetic primer
  Description of Combined DNA/RNA Molecule: Synthetic primer

SEQ ID NO: 3409 - DNA, 41 bp, Artificial Sequence; identical to SEQ ID NO: 2561
  Description of Artificial Sequence: Synthetic oligonucleotide
  Description of Combined DNA/RNA Molecule: Synthetic oligonucleotide

SEQ ID NO: 3410 - DNA, 42 bp, Artificial Sequence; identical to SEQ ID NO: 2562
  Description of Artificial Sequence: Synthetic oligonucleotide

SEQ ID NO: 3411 - DNA, 20 bp, Artificial Sequence
  Description of Artificial Sequence: Synthetic probe
aatgacatcggcgtcggcgg

SEQ ID NO: 3412 - DNA, 19 bp, Artificial Sequence
  Description of Artificial Sequence: Synthetic primer
tagcattcgagaacgcacc

SEQ ID NO: 3413 - DNA, 21 bp, Artificial Sequence
  Description of Artificial Sequence: Synthetic primer
tggaactgtgtgactagcacc

SEQ ID NO: 3414 - DNA, 54 bp, Artificial Sequence; identical to SEQ ID NO: 2566
  Description of Artificial Sequence: Synthetic primer
  Description of Combined DNA/RNA Molecule: Synthetic primer

SEQ ID NO: 3415 - DNA, 26 bp, Artificial Sequence
  Description of Artificial Sequence: Synthetic primer
  Description of Combined DNA/RNA Molecule: Synthetic primer
gcgcgcgttaaaaagattttcggtta

SEQ ID NO: 3416 - DNA, 41 bp, Artificial Sequence
  Description of Artificial Sequence: Synthetic primer
  Description of Combined DNA/RNA Molecule: Synthetic primer
ggtgtcgtggacacactaaaaataccgttcacataauccat

SEQ ID NO: 3417 - DNA, 53 bp, Artificial Sequence
  Description of Artificial Sequence: Synthetic oligonucleotide
  Description of Combined DNA/RNA Molecule: Synthetic oligonucleotide
ttgcaaaccacccggacaagattttcggttggagggatttttattctcgggca

SEQ ID NO: 3418 - DNA, 64 bp, Artificial Sequence
  Description of Artificial Sequence: Synthetic oligonucleotide
gggtgtatatttttaagttttcgttgttggtgatcggtaagatcttggtcagcatcgactccta

SEQ ID NO: 3419 - DNA, 41 bp, Artificial Sequence
  Description of Artificial Sequence: Synthetic probe
aatattctcgggtgtatatttttaagttttcgttgttggtg

SEQ ID NO: 3420 - DNA, 19 bp, Artificial Sequence
  Description of Artificial Sequence: Synthetic primer
ttgcaaaccacccggacaa

SEQ ID NO: 3421 - DNA, 20 bp, Artificial Sequence
  Description of Artificial Sequence: Synthetic primer
taggagtcgatgctgaccaa

SEQ ID NO: 3422 - DNA, 52 bp, Artificial Sequence
  Description of Artificial Sequence: Synthetic primer
  Description of Combined DNA/RNA Molecule: Synthetic primer
taggagtcgatgctgaccaaccgttcacataatccacgatcttactgatcat

SEQ ID NO: 3423 - DNA, 33 bp, Artificial Sequence
  Description of Artificial Sequence: Synthetic primer
  Description of Combined DNA/RNA Molecule: Synthetic primer
ttttcgattgaggtttgtatatatagtcgtttc

SEQ ID NO: 3424 - DNA, 33 bp, Artificial Sequence
  Description of Artificial Sequence: Synthetic primer
  Description of Combined DNA/RNA Molecule: Synthetic primer
ggtgtcgtgggcctccgcaaccgataaaacaat

SEQ ID NO: 3425 - DNA, 53 bp, Artificial Sequence
  Description of Artificial Sequence: Synthetic oligonucleotide
  Description of Combined DNA/RNA Molecule: Synthetic oligonucleotide
ttgcaaaccacccggacaatagtcgttttttttttcgttatcgtcagcggtgc

SEQ ID NO: 3426 - DNA, 58 bp, Artificial Sequence
  Description of Artificial Sequence: Synthetic oligonucleotide
ggtatatattcggttgggttttcgttttgtaagggaagttggtcagcatcgactccta

SEQ ID NO: 3427 - DNA, 38 bp, Artificial Sequence
  Description of Artificial Sequence: Synthetic probe
cccgtcagcggtatatattcggttgggttttcgttttg

SEQ ID NO: 3428 - DNA, 19 bp, Artificial Sequence
  Description of Artificial Sequence: Synthetic primer
ttgcaaaccacccggacaa

SEQ ID NO: 3429 - DNA, 20 bp, Artificial Sequence
  Description of Artificial Sequence: Synthetic primer
taggagtcgatgctgaccaa

SEQ ID NO: 3430 - DNA, 27 bp, Artificial Sequence
  Description of Artificial Sequence: Synthetic primer
  Description of Combined DNA/RNA Molecule: Synthetic primer
gagggtcgtttttattgtcgtcgggac

SEQ ID NO: 3431 - DNA, 33 bp, Artificial Sequence
  Description of Artificial Sequence: Synthetic primer
  Description of Combined DNA/RNA Molecule: Synthetic primer
ggtgtcgtggccaaaacgcgctaaacgccgaag

SEQ ID NO: 3432 - DNA, 55 bp, Artificial Sequence
  Description of Artificial Sequence: Synthetic oligonucleotide
  Description of Combined DNA/RNA Molecule: Synthetic oligonucleotide
taagacgtatgctagcgccaaattgtcgtcgggattttttgtagttgctcgttct

SEQ ID NO: 3433 - DNA, 56 bp, Artificial Sequence
  Description of Artificial Sequence: Synthetic oligonucleotide
gtttcgcgttgttagggttgttagggttttattttgttggtcagcatcgactccta

SEQ ID NO: 3434 - DNA, 33 bp, Artificial Sequence
  Description of Artificial Sequence: Synthetic probe
ccgttgctcgtttcgcgttgttagggttgttag

SEQ ID NO: 3435 - DNA, 21 bp, Artificial Sequence
  Description of Artificial Sequence: Synthetic primer
taagacgtatgctagcgccaa

SEQ ID NO: 3436 - DNA, 20 bp, Artificial Sequence
  Description of Artificial Sequence: Synthetic primer
taggagtcgatgctgaccaa

SEQ ID NO: 3437 - DNA, 45 bp, Artificial Sequence
  Description of Artificial Sequence: Synthetic primer
  Description of Combined DNA/RNA Molecule: Synthetic primer
taggagtcgatgctgaccaaccaaaacgcgctaaacgctgaaatg

SEQ ID NO: 3438 - DNA, 24 bp, Artificial Sequence
  Description of Artificial Sequence: Synthetic primer
  Description of Combined DNA/RNA Molecule: Synthetic primer
gttcggtttgcgtggttacggttg

SEQ ID NO: 3439 - DNA, 33 bp, Artificial Sequence
  Description of Artificial Sequence: Synthetic primer
  Description of Combined DNA/RNA Molecule: Synthetic primer
ggtgtcgtggctacgacaacgacgacgacgact

SEQ ID NO: 3440 - DNA, 50 bp, Artificial Sequence
  Description of Artificial Sequence: Synthetic oligonucleotide
  Description of Combined DNA/RNA Molecule: Synthetic oligonucleotide
tacatgccatcccacgacacgtggttacggttattattcgtatgcgtacc

SEQ ID NO: 3441 - DNA, 65 bp, Artificial Sequence
  Description of Artificial Sequence: Synthetic oligonucleotide
gtattcgtattattattattatttcgtgagtttagtcgtcgcggtctgtgtcggagcggttacta

SEQ ID NO: 3442 - DNA, 49 bp, Artificial Sequence
  Description of Artificial Sequence: Synthetic probe
aacgtatgcgtattcgtattattattattatttcgtgagtttagtcgtc

SEQ ID NO: 3443 - DNA, 19 bp, Artificial Sequence
  Description of Artificial Sequence: Synthetic primer
tacatgccatcccacgaca

SEQ ID NO: 3444 - DNA, 19 bp, Artificial Sequence
  Description of Artificial Sequence: Synthetic primer
tagtaaccgctccgacaca

SEQ ID NO: 3445 - DNA, 44 bp, Artificial Sequence
  Description of Artificial Sequence: Synthetic primer
  Description of Combined DNA/RNA Molecule: Synthetic primer
tagtaaccgctccgacacagacaacgacgacgacgactgcgaca

SEQ ID NO: 3446 - DNA, 26 bp, Artificial Sequence
  Description of Artificial Sequence: Synthetic primer
  Description of Combined DNA/RNA Molecule: Synthetic primer
gttcggtttttggaggatagcgggac

SEQ ID NO: 3447 - DNA, 37 bp, Artificial Sequence
  Description of Artificial Sequence: Synthetic primer
  Description of Combined DNA/RNA Molecule: Synthetic primer
ggtgtcgtggcacaatacacttcccgacaacauaaag

SEQ ID NO: 3448 - DNA, 51 bp, Artificial Sequence
  Description of Artificial Sequence: Synthetic oligonucleotide
  Description of Combined DNA/RNA Molecule: Synthetic oligonucleotide
tccaaacaagctgatccgtacaaggatagcgggatgggagagtctcgttcg

SEQ ID NO: 3449 - DNA, 66 bp, Artificial Sequence
  Description of Artificial Sequence: Synthetic oligonucleotide
gtttatatttagtttcgtagagtcggatagaaacgttgttattgtcgtgtgtcggagcggttacta

SEQ ID NO: 3450 - DNA, 44 bp, Artificial Sequence
  Description of Artificial Sequence: Synthetic probe
ttgagtctcgtttatatttagtttcgtagagtcggatagaaacg

SEQ ID NO: 3451 - DNA, 22 bp, Artificial Sequence
  Description of Artificial Sequence: Synthetic primer
tccaaacaagctgatccgtaca

SEQ ID NO: 3452 - DNA, 19 bp, Artificial Sequence
  Description of Artificial Sequence: Synthetic primer
tagtaaccgctccgacaca

SEQ ID NO: 3453 - DNA, 54 bp, Artificial Sequence
  Description of Artificial Sequence: Synthetic primer
  Description of Combined DNA/RNA Molecule: Synthetic primer
tagtaaccgctccgacacacacaatacacttcccgacaacataaaattgacaac

SEQ ID NO: 3454 - DNA, 28 bp, Artificial Sequence
  Description of Artificial Sequence: Synthetic primer
  Description of Combined DNA/RNA Molecule: Synthetic primer
gggaataaaacgcgttggtaaacgcggt

SEQ ID NO: 3455 - DNA, 37 bp, Artificial Sequence
  Description of Artificial Sequence: Synthetic primer
  Description of Combined DNA/RNA Molecule: Synthetic primer
ggtgtcgtggccgattacctctcgatatcgaccccca

SEQ ID NO: 3456 - DNA, 44 bp, Artificial Sequence
  Description of Artificial Sequence: Synthetic oligonucleotide
  Description of Combined DNA/RNA Molecule: Synthetic oligonucleotide
tagggcgacagttaccacaaggcgacgtatagggagtgcgagta

SEQ ID NO: 3457 - DNA, 40 bp, Artificial Sequence
  Description of Artificial Sequence: Synthetic oligonucleotide
gagcgagggagggagcgtcgttgtgggtctcgctcgtata

SEQ ID NO: 3458 - DNA, 22 bp, Artificial Sequence
  Description of Artificial Sequence: Synthetic probe
ttggagtgcgagcgagggaggg

SEQ ID NO: 3459 - DNA, 20 bp, Artificial Sequence
  Description of Artificial Sequence: Synthetic primer
tagggcgacagttaccacaa

SEQ ID NO: 3460 - DNA, 20 bp, Artificial Sequence
  Description of Artificial Sequence: Synthetic primer
tatacgagcgagacccacaa

SEQ ID NO: 3461 - DNA, 50 bp, Artificial Sequence
  Description of Artificial Sequence: Synthetic primer
  Description of Combined DNA/RNA Molecule: Synthetic primer
tatacgagcgagacccacaagattacctctcgatatcgacccctgcgctt

SEQ ID NO: 3462 - DNA, 25 bp, Artificial Sequence
  Description of Artificial Sequence: Synthetic primer
  Description of Combined DNA/RNA Molecule: Synthetic primer
gttattcgttaggtgtcggcgttta

SEQ ID NO: 3463 - DNA, 38 bp, Artificial Sequence
  Description of Artificial Sequence: Synthetic primer
  Description of Combined DNA/RNA Molecule: Synthetic primer
ggtgtcgtggaaacattactaccaccgaaaaacuatct

SEQ ID NO: 3464 - DNA, 50 bp, Artificial Sequence
  Description of Artificial Sequence: Synthetic oligonucleotide
  Description of Combined DNA/RNA Molecule: Synthetic oligonucleotide
tccgactttagtgcgtcacaacggcgtttgttgagttttagcatcgttga

SEQ ID NO: 3465 - DNA, 66 bp, Artificial Sequence
  Description of Artificial Sequence: Synthetic oligonucleotide
gttagatttttgttagcgaggtttagagtagtgtagagatttagcgttgtgggtctcgctcgtata

SEQ ID NO: 3466 - DNA, 42 bp, Artificial Sequence
  Description of Artificial Sequence: Synthetic probe
aatagcatcgttagatttttgttagcgaggtttagagtagtg

SEQ ID NO: 3467 - DNA, 21 bp, Artificial Sequence
  Description of Artificial Sequence: Synthetic primer
tccgactttagtgcgtcacaa

SEQ ID NO: 3468 - DNA, 20 bp, Artificial Sequence
  Description of Artificial Sequence: Synthetic primer
tatacgagcgagacccacaa

SEQ ID NO: 3469 - DNA, 54 bp, Artificial Sequence
  Description of Artificial Sequence: Synthetic primer
  Description of Combined DNA/RNA Molecule: Synthetic primer
tatacgagcgagacccacaaaaacattactaccaccgaaaaactatctgctaag

SEQ ID NO: 3470 - DNA, 25 bp, Artificial Sequence
  Description of Artificial Sequence: Synthetic primer
  Description of Combined DNA/RNA Molecule: Synthetic primer
gggcgggaaagtgatttttcggaag

SEQ ID NO: 3471 - DNA, 34 bp, Artificial Sequence
  Description of Artificial Sequence: Synthetic primer
  Description of Combined DNA/RNA Molecule: Synthetic primer
ggtgtcgtggcgatacgcaaaacgacgaccacat

SEQ ID NO: 3472 - DNA, 52 bp, Artificial Sequence
  Description of Artificial Sequence: Synthetic oligonucleotide
  Description of Combined DNA/RNA Molecule: Synthetic oligonucleotide
tcaaacaaaggcgaccacaacgtagagtatttcgaagaaggcggatcgcgta

SEQ ID NO: 3473 - DNA, 51 bp, Artificial Sequence
  Description of Artificial Sequence: Synthetic oligonucleotide
gcgcgagttaagttgacgttattggtcgggttgtcgcataggcagttcata

SEQ ID NO: 3474 - DNA, 27 bp, Artificial Sequence
  Description of Artificial Sequence: Synthetic probe
ttgcggatcgcgcgagttaagttgacg

SEQ ID NO: 3475 - DNA, 21 bp, Artificial Sequence
  Description of Artificial Sequence: Synthetic primer
tcaaacaaaggcgaccacaac

SEQ ID NO: 3476 - DNA, 22 bp, Artificial Sequence
  Description of Artificial Sequence: Synthetic primer
tatgaactgcctatgcgacaac

SEQ ID NO: 3477 - DNA, 47 bp, Artificial Sequence
  Description of Artificial Sequence: Synthetic primer
  Description of Combined DNA/RNA Molecule: Synthetic primer
tatgaactgcctatgcgacaacgcaaaacgacgaccacactgaccag

SEQ ID NO: 3478 - DNA, 20 bp, Artificial Sequence
  Description of Artificial Sequence: Synthetic primer
  Description of Combined DNA/RNA Molecule: Synthetic primer
gttcggtgggtgggcgtata

SEQ ID NO: 3479 - DNA, 50 bp, Artificial Sequence
  Description of Artificial Sequence: Synthetic primer
  Description of Combined DNA/RNA Molecule: Synthetic primer
ggtgtcgtggatataatatataataaaataaaattaaacctccgaaaaag

SEQ ID NO: 3480 - DNA, 53 bp, Artificial Sequence
  Description of Artificial Sequence: Synthetic oligonucleotide
  Description of Combined DNA/RNA Molecule: Synthetic oligonucleotide
taaacaatgagacccgctgaacgggcgtatgcgtataggattttcatcgttga

SEQ ID NO: 3481 - DNA, 60 bp, Artificial Sequence
  Description of Artificial Sequence: Synthetic oligonucleotide
gttaggtatttgcggaatatatttggaaatcgttttttgttgtcgcataggcagttcata

SEQ ID NO: 3482 - DNA, 41 bp, Artificial Sequence
  Description of Artificial Sequence: Synthetic probe
cctttcatcgttaggtatttgcggaatatatttggaaatcg

SEQ ID NO: 3483 - DNA, 22 bp, Artificial Sequence
  Description of Artificial Sequence: Synthetic primer
taaacaatgagacccgctgaac

SEQ ID NO: 3484 - DNA, 22 bp, Artificial Sequence
  Description of Artificial Sequence: Synthetic primer
tatgaactgcctatgcgacaac

SEQ ID NO: 3485 - DNA, 26 bp, Artificial Sequence
  Description of Artificial Sequence: Synthetic primer
  Description of Combined DNA/RNA Molecule: Synthetic primer
tttttttgtagacgaggaggcgtaga

SEQ ID NO: 3486 - DNA, 32 bp, Artificial Sequence
  Description of Artificial Sequence: Synthetic primer
  Description of Combined DNA/RNA Molecule: Synthetic primer
ggtgtcgtggccgccgacccaactaacucaag

SEQ ID NO: 3487 - DNA, 41 bp, Artificial Sequence
  Description of Artificial Sequence: Synthetic oligonucleotide
  Description of Combined DNA/RNA Molecule: Synthetic oligonucleotide
tctgccagaacaccgacaccgaggaggcgtaggagcgagca

SEQ ID NO: 3488 - DNA, 42 bp, Artificial Sequence
  Description of Artificial Sequence: Synthetic oligonucleotide
gagtggagagggcgttttcggtggtgtgttggcgtacggtga

SEQ ID NO: 3489 - DNA, 22 bp, Artificial Sequence
  Description of Artificial Sequence: Synthetic probe
tttaggagcgagtggagagggc

SEQ ID NO: 3490 - DNA, 19 bp, Artificial Sequence
  Description of Artificial Sequence: Synthetic primer
tctgccagaacaccgacac

SEQ ID NO: 3491 - DNA, 19 bp, Artificial Sequence
  Description of Artificial Sequence: Synthetic primer
tcaccgtacgccaacacac

SEQ ID NO: 3492 - DNA, 54 bp, Artificial Sequence
  Description of Artificial Sequence: Synthetic primer
  Description of Combined DNA/RNA Molecule: Synthetic primer
tcaccgtacgccaacacaccgacccaactaactcaaaaaaatattcgtgcgctt

SEQ ID NO: 3493 - DNA, 25 bp, Artificial Sequence
  Description of Artificial Sequence: Synthetic primer
  Description of Combined DNA/RNA Molecule: Synthetic primer
agtttgtgtcgtggagtagcggcga

SEQ ID NO: 3494 - DNA, 32 bp, Artificial Sequence
  Description of Artificial Sequence: Synthetic primer
  Description of Combined DNA/RNA Molecule: Synthetic primer
ggtgtcgtggccgctatcccccgatacctccg

SEQ ID NO: 3495 - DNA, 43 bp, Artificial Sequence
  Description of Artificial Sequence: Synthetic oligonucleotide
  Description of Combined DNA/RNA Molecule: Synthetic oligonucleotide
tccggatcaaagcagccacgtggagtagcggcgggcacgggaa

SEQ ID NO: 3496 - DNA, 43 bp, Artificial Sequence
  Description of Artificial Sequence: Synthetic oligonucleotide
gggagatattgggaggagtagcgggtgtgttggcgtacggtga

SEQ ID NO: 3497 - DNA, 22 bp, Artificial Sequence
  Description of Artificial Sequence: Synthetic probe
ttcgggcacgggagatattggg

SEQ ID NO: 3498 - DNA, 19 bp, Artificial Sequence
  Description of Artificial Sequence: Synthetic primer
tccggatcaaagcagccac

SEQ ID NO: 3499 - DNA, 19 bp, Artificial Sequence
  Description of Artificial Sequence: Synthetic primer
tcaccgtacgccaacacac

SEQ ID NO: 3500 - DNA, 46 bp, Artificial Sequence
  Description of Artificial Sequence: Synthetic primer
  Description of Combined DNA/RNA Molecule: Synthetic primer
tcaccgtacgccaacacaccgatacctccaaatacccgctgctacc

SEQ ID NO: 3501 - DNA, 24 bp, Artificial Sequence
  Description of Artificial Sequence: Synthetic primer
  Description of Combined DNA/RNA Molecule: Synthetic primer
cgtagatttgcgggtgttcgtttg

SEQ ID NO: 3502 - DNA, 37 bp, Artificial Sequence
  Description of Artificial Sequence: Synthetic primer
  Description of Combined DNA/RNA Molecule: Synthetic primer
ggtgtcgtggccccaaaaaatacctaatccgauattc

SEQ ID NO: 3503 - DNA, 50 bp, Artificial Sequence
  Description of Artificial Sequence: Synthetic oligonucleotide
  Description of Combined DNA/RNA Molecule: Synthetic oligonucleotide
ttctagataccacggacgcaccgggtgttcgtttattcgcgtctcgcgcc

SEQ ID NO: 3504 - DNA, 60 bp, Artificial Sequence
  Description of Artificial Sequence: Synthetic oligonucleotide
gcgtttttatatttgatttgtgtggatgtggagttttcgggtgttggtgtgcaaagctga

SEQ ID NO: 3505 - DNA, 38 bp, Artificial Sequence
  Description of Artificial Sequence: Synthetic probe
aagcgtctcgcgtttttatatttgatttgtgtggatgt

SEQ ID NO: 3506 - DNA, 21 bp, Artificial Sequence
  Description of Artificial Sequence: Synthetic primer
ttctagataccacggacgcac

SEQ ID NO: 3507 - DNA, 20 bp, Artificial Sequence
  Description of Artificial Sequence: Synthetic primer
tcagctttgcacaccaacac

SEQ ID NO: 3508 - DNA, 55 bp, Artificial Sequence
  Description of Artificial Sequence: Synthetic primer
  Description of Combined DNA/RNA Molecule: Synthetic primer
tcagctttgcacaccaacaccccaaaaaatacctaatccgatatttcctgaaaat

SEQ ID NO: 3509 - DNA, 26 bp, Artificial Sequence
  Description of Artificial Sequence: Synthetic primer
  Description of Combined DNA/RNA Molecule: Synthetic primer
ggatttaggtatgaggtcgtcgtaac

SEQ ID NO: 3510 - DNA, 39 bp, Artificial Sequence
  Description of Artificial Sequence: Synthetic primer
  Description of Combined DNA/RNA Molecule: Synthetic primer
ggtgtcgtggaactcgaatttcgcgatctttaaauaacc

SEQ ID NO: 3511 - DNA, 62 bp, Artificial Sequence
  Description of Artificial Sequence: Synthetic oligonucleotide
  Description of Combined DNA/RNA Molecule: Synthetic oligonucleotide
tatgcggaccgatgactcaagtaatggaaaggattttttaaatatatttatcgcagcgggca

SEQ ID NO: 3512 - DNA, 53 bp, Artificial Sequence
  Description of Artificial Sequence: Synthetic oligonucleotide
gggagagttgagagtatggttaggtgtcgcgttgcttggcttgatctacctga

SEQ ID NO: 3513 - DNA, 28 bp, Artificial Sequence
  Description of Artificial Sequence: Synthetic probe
cctcgcagcgggagagttgagagtatgg

SEQ ID NO: 3514 - DNA, 20 bp, Artificial Sequence
  Description of Artificial Sequence: Synthetic primer
tatgcggaccgatgactcaa

SEQ ID NO: 3515 - DNA, 22 bp, Artificial Sequence
  Description of Artificial Sequence: Synthetic primer
tcaggtagatcaagccaagcaa

SEQ ID NO: 3516 - DNA, 57 bp, Artificial Sequence
  Description of Artificial Sequence: Synthetic primer
  Description of Combined DNA/RNA Molecule: Synthetic primer
tcaggtagatcaagccaagcaactttaaataactaaaacaaatccccacgtgacact

SEQ ID NO: 3517 - DNA, 24 bp, Artificial Sequence
  Description of Artificial Sequence: Synthetic primer
  Description of Combined DNA/RNA Molecule: Synthetic primer
gtttcgggaggagggtttcggcga

SEQ ID NO: 3518 - DNA, 30 bp, Artificial Sequence
  Description of Artificial Sequence: Synthetic primer
  Description of Combined DNA/RNA Molecule: Synthetic primer
ggtgtcgtggtaaacccccgccgccuccgt

SEQ ID NO: 3519 - DNA, 40 bp, Artificial Sequence
  Description of Artificial Sequence: Synthetic oligonucleotide
  Description of Combined DNA/RNA Molecule: Synthetic oligonucleotide
ttcgtgggcacacaagcaaggtttcggcgggtagcggcac

SEQ ID NO: 3520 - DNA, 50 bp, Artificial Sequence
  Description of Artificial Sequence: Synthetic oligonucleotide
ggcgtaggagttcgaggagatagatcggttgcttggcttgatctacctga

SEQ ID NO: 3521 - DNA, 26 bp, Artificial Sequence
  Description of Artificial Sequence: Synthetic probe
ttgggtagcggcgtaggagttcgagg

SEQ ID NO: 3522 - DNA, 19 bp, Artificial Sequence
  Description of Artificial Sequence: Synthetic primer
ttcgtgggcacacaagcaa

SEQ ID NO: 3523 - DNA, 22 bp, Artificial Sequence
  Description of Artificial Sequence: Synthetic primer
tcaggtagatcaagccaagcaa

SEQ ID NO: 3524 - DNA, 42 bp, Artificial Sequence
  Description of Artificial Sequence: Synthetic primer
  Description of Combined DNA/RNA Molecule: Synthetic primer
tcaggtagatcaagccaagcaaccgccaccacccctgccgct

SEQ ID NO: 3525 - DNA, 33 bp, Artificial Sequence
  Description of Artificial Sequence: Synthetic primer
  Description of Combined DNA/RNA Molecule: Synthetic primer
atttttatttttattcgcgtttttcggautggc

SEQ ID NO: 3526 - DNA, 39 bp, Artificial Sequence
  Description of Artificial Sequence: Synthetic primer
  Description of Combined DNA/RNA Molecule: Synthetic primer
ggtgtcgtgggatacgaaaattacccgtaacgtcaaaac

SEQ ID NO: 3527 - DNA, 52 bp, Artificial Sequence
  Description of Artificial Sequence: Synthetic oligonucleotide
  Description of Combined DNA/RNA Molecule: Synthetic oligonucleotide
ttgaaggaggaaatcggcacaggtaggtttttggaagtttaggttgcggcac

SEQ ID NO: 3528 - DNA, 62 bp, Artificial Sequence
  Description of Artificial Sequence: Synthetic oligonucleotide
ggcgtttatcgtaaaattttttttcgtcgtagtttcgtgatgtcgaaccgttttaggactga

SEQ ID NO: 3529 - DNA, 37 bp, Artificial Sequence
  Description of Artificial Sequence: Synthetic probe
aaaggttgcggcgtttatcgtaaaattttttttcgtc

SEQ ID NO: 3530 - DNA, 21 bp, Artificial Sequence
  Description of Artificial Sequence: Synthetic primer
ttgaaggaggaaatcggcaca

SEQ ID NO: 3531 - DNA, 22 bp, Artificial Sequence
  Description of Artificial Sequence: Synthetic primer
tcagtcctaaaacggttcgaca

SEQ ID NO: 3532 - DNA, 55 bp, Artificial Sequence
  Description of Artificial Sequence: Synthetic primer
  Description of Combined DNA/RNA Molecule: Synthetic primer
tcagtcctaaaacggttcgacagaaaattacccgtaacgtcaaaatcatgaaacc

SEQ ID NO: 3533 - DNA, 24 bp, Artificial Sequence
  Description of Artificial Sequence: Synthetic primer
  Description of Combined DNA/RNA Molecule: Synthetic primer
gggatcgttggttgtaggcgtttc

SEQ ID NO: 3534 - DNA, 34 bp, Artificial Sequence
  Description of Artificial Sequence: Synthetic primer
  Description of Combined DNA/RNA Molecule: Synthetic primer
ggtgtcgtggccactccctcatctacgaccccgc

SEQ ID NO: 3535 - DNA, 49 bp, Artificial Sequence
  Description of Artificial Sequence: Synthetic oligonucleotide
  Description of Combined DNA/RNA Molecule: Synthetic oligonucleotide
ttcggcaggctacggtacaggttgtaggcgttttgttggagctcggagt

SEQ ID NO: 3536 - DNA, 54 bp, Artificial Sequence
  Description of Artificial Sequence: Synthetic oligonucleotide
ggaacgagggtggttagggtcgtttttttacgtgtcgaaccgttttaggactga

SEQ ID NO: 3537 - DNA, 27 bp, Artificial Sequence
  Description of Artificial Sequence: Synthetic probe
aaggagctcggaacgagggtggttagg

SEQ ID NO: 3538 - DNA, 19 bp, Artificial Sequence
  Description of Artificial Sequence: Synthetic primer
ttcggcaggctacggtaca

SEQ ID NO: 3539 - DNA, 22 bp, Artificial Sequence
  Description of Artificial Sequence: Synthetic primer
tcagtcctaaaacggttcgaca

SEQ ID NO: 3540 - DNA, 48 bp, Artificial Sequence
  Description of Artificial Sequence: Synthetic primer
  Description of Combined DNA/RNA Molecule: Synthetic primer
tcagtcctaaaacggttcgacaactccctcatctacgaccctguaaag

SEQ ID NO: 3541 - DNA, 27 bp, Artificial Sequence
  Description of Artificial Sequence: Synthetic primer
  Description of Combined DNA/RNA Molecule: Synthetic primer
tggcgaggttattgtagagttcgggcg

SEQ ID NO: 3542 - DNA, 35 bp, Artificial Sequence
  Description of Artificial Sequence: Synthetic primer
  Description of Combined DNA/RNA Molecule: Synthetic primer
ggtgtcgtggcctttacgtccgactacgacctaag

SEQ ID NO: 3543 - DNA, 49 bp, Artificial Sequence
  Description of Artificial Sequence: Synthetic oligonucleotide
  Description of Combined DNA/RNA Molecule: Synthetic oligonucleotide
tctcgacgatgaaaagcaacagggatgttttggtcgtaggaagcgtaaa

SEQ ID NO: 3544 - DNA, 45 bp, Artificial Sequence
  Description of Artificial Sequence: Synthetic oligonucleotide
gtagggtaggttgtcgtaggcgtcggtgtgggtactgtccgtgga

SEQ ID NO: 3545 - DNA, 29 bp, Artificial Sequence
  Description of Artificial Sequence: Synthetic probe
aaaggaagcgtagggtaggttgtcgtagg

SEQ ID NO: 3546 - DNA, 21 bp, Artificial Sequence
  Description of Artificial Sequence: Synthetic primer
tctcgacgatgaaaagcaaca

SEQ ID NO: 3547 - DNA, 19 bp, Artificial Sequence
  Description of Artificial Sequence: Synthetic primer
tccacggacagtacccaca

SEQ ID NO: 3548 - DNA, 45 bp, Artificial Sequence
  Description of Artificial Sequence: Synthetic primer
  Description of Combined DNA/RNA Molecule: Synthetic primer
tccacggacagtacccacaccgactacgacctaaacgctgacgct

SEQ ID NO: 3549 - DNA, 23 bp, Artificial Sequence
  Description of Artificial Sequence: Synthetic primer
  Description of Combined DNA/RNA Molecule: Synthetic primer
gcggtcgttattggttgcggttc

SEQ ID NO: 3550 - DNA, 48 bp, Artificial Sequence
  Description of Artificial Sequence: Synthetic primer
  Description of Combined DNA/RNA Molecule: Synthetic primer
ggtgtcgtggaaaataaaactctaaaaaaacaaaatacgaaaaaaaac

SEQ ID NO: 3551 - DNA, 50 bp, Artificial Sequence
  Description of Artificial Sequence: Synthetic oligonucleotide
  Description of Combined DNA/RNA Molecule: Synthetic oligonucleotide
ttctaggcgacacgacaacaggttggttatgtgtaggcgtcgctcgttcc

SEQ ID NO: 3552 - DNA, 55 bp, Artificial Sequence
  Description of Artificial Sequence: Synthetic oligonucleotide
gtttttacggttttttttttgattttttcggcgaattgtgggtactgtccgtgga

SEQ ID NO: 3553 - DNA, 39 bp, Artificial Sequence
  Description of Artificial Sequence: Synthetic probe
ttgtcgctcgtttttacggttttttttttgattttttcg

SEQ ID NO: 3554 - DNA, 20 bp, Artificial Sequence
  Description of Artificial Sequence: Synthetic primer
ttctaggcgacacgacaaca

SEQ ID NO: 3555 - DNA, 19 bp, Artificial Sequence
  Description of Artificial Sequence: Synthetic primer
tccacggacagtacccaca

SEQ ID NO: 3556 - DNA, 63 bp, Artificial Sequence
  Description of Artificial Sequence: Synthetic primer
  Description of Combined DNA/RNA Molecule: Synthetic primer
tccacggacagtacccacaaataaaactctaaaaaaacaaaatacgaaaaaaaatttgccgag

SEQ ID NO: 3557 - DNA, 23 bp, Artificial Sequence
  Description of Artificial Sequence: Synthetic primer
  Description of Combined DNA/RNA Molecule: Synthetic primer
ggagacgtcgttcgtgtcgtgtc

SEQ ID NO: 3558 - DNA, 42 bp, Artificial Sequence
  Description of Artificial Sequence: Synthetic primer
  Description of Combined DNA/RNA Molecule: Synthetic primer
ggtgtcgtggctactattccgataactaaaaacgaaaaacat

SEQ ID NO: 3559 - DNA, 50 bp, Artificial Sequence
  Description of Artificial Sequence: Synthetic oligonucleotide
  Description of Combined DNA/RNA Molecule: Synthetic oligonucleotide
tttcaggccctaaccaccacgtcgtgttaggttgttttcgagcgcgttac

SEQ ID NO: 3560 - DNA, 56 bp, Artificial Sequence
  Description of Artificial Sequence: Synthetic oligonucleotide
gtttgtcgtgagtttttgtcgcgtgatttattcgtggtgggattaagggcgatgga

SEQ ID NO: 3561 - DNA, 30 bp, Artificial Sequence
  Description of Artificial Sequence: Synthetic probe
aacgagcgcgtttgtcgtgagtttttgtcg

SEQ ID NO: 3562 - DNA, 20 bp, Artificial Sequence
  Description of Artificial Sequence: Synthetic primer
tttcaggccctaaccaccac

SEQ ID NO: 3563 - DNA, 20 bp, Artificial Sequence
  Description of Artificial Sequence: Synthetic primer
tccatcgcccttaatcccac

SEQ ID NO: 3564 - DNA, 59 bp, Artificial Sequence
  Description of Artificial Sequence: Synthetic primer
  Description of Combined DNA/RNA Molecule: Synthetic primer
tccatcgcccttaatcccacgataactaaaaacgaaaaacacgaataaatcatgcgacg

SEQ ID NO: 3565 - DNA, 24 bp, Artificial Sequence
  Description of Artificial Sequence: Synthetic primer
  Description of Combined DNA/RNA Molecule: Synthetic primer
tggtagacgttttggcgtcgggcg

SEQ ID NO: 3566 - DNA, 39 bp, Artificial Sequence
  Description of Artificial Sequence: Synthetic primer
  Description of Combined DNA/RNA Molecule: Synthetic primer
ggtgtcgtggataaaacgctacaaaacgaaactaaaact

SEQ ID NO: 3567 - DNA, 47 bp, Artificial Sequence
  Description of Artificial Sequence: Synthetic oligonucleotide
  Description of Combined DNA/RNA Molecule: Synthetic oligonucleotide
tatctcctaaaagaagccgcacggcgtcgggtagcggttgtcggtca

SEQ ID NO: 3568 - DNA, 58 bp, Artificial Sequence
  Description of Artificial Sequence: Synthetic oligonucleotide
ggttggtttttattttcgcgcgtattttttaaattgtggtgggattaagggcgatgga

SEQ ID NO: 3569 - DNA, 31 bp, Artificial Sequence
  Description of Artificial Sequence: Synthetic probe
ttggttgtcggttggtttttattttcgcgcg

SEQ ID NO: 3570 - DNA, 22 bp, Artificial Sequence
  Description of Artificial Sequence: Synthetic primer
tatctcctaaaagaagccgcac

SEQ ID NO: 3571 - DNA, 20 bp, Artificial Sequence
  Description of Artificial Sequence: Synthetic primer
tccatcgcccttaatcccac

SEQ ID NO: 3572 - DNA, 30 bp, Artificial Sequence; identical to SEQ ID NO: 1401
  Description of Artificial Sequence: Synthetic primer
  Description of Combined DNA/RNA Molecule: Synthetic primer

SEQ ID NO: 3573 - DNA, 36 bp, Artificial Sequence; identical to SEQ ID NO: 1402
  Description of Artificial Sequence: Synthetic primer
  Description of Combined DNA/RNA Molecule: Synthetic primer

SEQ ID NO: 3574 - DNA, 53 bp, Artificial Sequence; identical to SEQ ID NO: 1403
  Description of Artificial Sequence: Synthetic oligonucleotide
  Description of Combined DNA/RNA Molecule: Synthetic oligonucleotide

SEQ ID NO: 3575 - DNA, 69 bp, Artificial Sequence; identical to SEQ ID NO: 1404
  Description of Artificial Sequence: Synthetic oligonucleotide

SEQ ID NO: 3576 - DNA, 38 bp, Artificial Sequence; identical to SEQ ID NO: 1405
  Description of Artificial Sequence: Synthetic probe

SEQ ID NO: 3577 - DNA, 21 bp, Artificial Sequence
  Description of Artificial Sequence: Synthetic primer
tgaacgctcaaacacgtgaac

SEQ ID NO: 3578 - DNA, 20 bp, Artificial Sequence
  Description of Artificial Sequence: Synthetic primer
tggaacgcttacaggccaac

SEQ ID NO: 3579 - DNA, 20 bp, Artificial Sequence
  Description of Artificial Sequence: Synthetic primer
  Description of Combined DNA/RNA Molecule: Synthetic primer
gcggtagagcgaggcgttga

SEQ ID NO: 3580 - DNA, 35 bp, Artificial Sequence
  Description of Artificial Sequence: Synthetic primer
  Description of Combined DNA/RNA Molecule: Synthetic primer
ggtgtcgtggactcacgacaaccaacgaaaaaatg

SEQ ID NO: 3581 - DNA, 41 bp, Artificial Sequence
  Description of Artificial Sequence: Synthetic oligonucleotide
  Description of Combined DNA/RNA Molecule: Synthetic oligonucleotide
tcgctcttcagcctcctacacgttggtgtcggcagcgggta

SEQ ID NO: 3582 - DNA, 49 bp, Artificial Sequence
  Description of Artificial Sequence: Synthetic oligonucleotide
gggcgtgcggtatattagttatcggcgtgttctgggaattattgccgga

SEQ ID NO: 3583 - DNA, 17 bp, Artificial Sequence
  Description of Artificial Sequence: Synthetic probe
aacggcagcgggcgtgc

SEQ ID NO: 3584 - DNA, 20 bp, Artificial Sequence
  Description of Artificial Sequence: Synthetic primer
tcgctcttcagcctcctaca

SEQ ID NO: 3585 - DNA, 22 bp, Artificial Sequence
  Description of Artificial Sequence: Synthetic primer
tccggcaataattcccagaaca

SEQ ID NO: 3586 - DNA, 55 bp, Artificial Sequence
  Description of Artificial Sequence: Synthetic primer
  Description of Combined DNA/RNA Molecule: Synthetic primer
tccggcaataattcccagaacaccaacgaaaaaataaccaaaaaacgctgataat

SEQ ID NO: 3587 - DNA, 24 bp, Artificial Sequence
  Description of Artificial Sequence: Synthetic primer
  Description of Combined DNA/RNA Molecule: Synthetic primer
ggtcgtcggcgtagtattcgggca

SEQ ID NO: 3588 - DNA, 39 bp, Artificial Sequence
  Description of Artificial Sequence: Synthetic primer
  Description of Combined DNA/RNA Molecule: Synthetic primer
ggtgtcgtggtcaaactatatcgaccccaaattccctct

SEQ ID NO: 3589 - DNA, 46 bp, Artificial Sequence
  Description of Artificial Sequence: Synthetic oligonucleotide
  Description of Combined DNA/RNA Molecule: Synthetic oligonucleotide
ttcaacgatcgcgcagacacgtagtattcgggcgagtgatcgttaa

SEQ ID NO: 3590 - DNA, 63 bp, Artificial Sequence
  Description of Artificial Sequence: Synthetic oligonucleotide
gttgggtaggtaatcgttttgtgaatatttttcgtatggagtgttctgggaattattgccgga

SEQ ID NO: 3591 - DNA, 35 bp, Artificial Sequence
  Description of Artificial Sequence: Synthetic probe
ttagtgatcgttgggtaggtaatcgttttgtgaat

SEQ ID NO: 3592 - DNA, 19 bp, Artificial Sequence
  Description of Artificial Sequence: Synthetic primer
ttcaacgatcgcgcagaca

SEQ ID NO: 3593 - DNA, 22 bp, Artificial Sequence
  Description of Artificial Sequence: Synthetic primer
tccggcaataattcccagaaca

SEQ ID NO: 3594 - DNA, 50 bp, Artificial Sequence
  Description of Artificial Sequence: Synthetic primer
  Description of Combined DNA/RNA Molecule: Synthetic primer
tccggcaataattcccagaacacgaccccaaattccctccatatgaaaag

SEQ ID NO: 3595 - DNA, 32 bp, Artificial Sequence
  Description of Artificial Sequence: Synthetic primer
  Description of Combined DNA/RNA Molecule: Synthetic primer
gttaagtgaataaagttaggcgtttacgtgac

SEQ ID NO: 3596 - DNA, 43 bp, Artificial Sequence
  Description of Artificial Sequence: Synthetic primer
  Description of Combined DNA/RNA Molecule: Synthetic primer
ggtgtcgtggaacctctttaactaaaataaaatccgaauaaat

SEQ ID NO: 3597 - DNA, 55 bp, Artificial Sequence
  Description of Artificial Sequence: Synthetic oligonucleotide
  Description of Combined DNA/RNA Molecule: Synthetic oligonucleotide
tcactatcggcgtagtcaccacgtttacgtgatttttcgagttaatgatcgttct

SEQ ID NO: 3598 - DNA, 55 bp, Artificial Sequence
  Description of Artificial Sequence: Synthetic oligonucleotide
gtttcgtttgcgattttcggataaggaaatttgtttggtgactttacccggagga

SEQ ID NO: 3599 - DNA, 35 bp, Artificial Sequence
  Description of Artificial Sequence: Synthetic probe
aaaatgatcgtttcgtttgcgattttcggataagg

SEQ ID NO: 3600 - DNA, 21 bp, Artificial Sequence
  Description of Artificial Sequence: Synthetic primer
tcactatcggcgtagtcacca

SEQ ID NO: 3601 - DNA, 20 bp, Artificial Sequence
  Description of Artificial Sequence: Synthetic primer
tcctccgggtaaagtcacca

SEQ ID NO: 3602 - DNA, 27 bp, Artificial Sequence
  Description of Artificial Sequence: Synthetic primer
  Description of Combined DNA/RNA Molecule: Synthetic primer
gttatgaggatttttgtggttcgggtt

SEQ ID NO: 3603 - DNA, 35 bp, Artificial Sequence
  Description of Artificial Sequence: Synthetic primer
  Description of Combined DNA/RNA Molecule: Synthetic primer
ggtgtcgtggcgaccgattccttccacttcutact

SEQ ID NO: 3604 - DNA, 50 bp, Artificial Sequence
  Description of Artificial Sequence: Synthetic oligonucleotide
  Description of Combined DNA/RNA Molecule: Synthetic oligonucleotide
tcatctgttcgtcagggtccaggatttttgtggttcgggtcgctcgtaac

SEQ ID NO: 3605 - DNA, 62 bp, Artificial Sequence
  Description of Artificial Sequence: Synthetic oligonucleotide
gtagttttattttggtaggatttacgtcgttattggtcgaagtggtgactttacccggagga

SEQ ID NO: 3606 - DNA, 38 bp, Artificial Sequence
  Description of Artificial Sequence: Synthetic probe
ttgtcgctcgtagttttattttggtaggatttacgtcg

SEQ ID NO: 3607 - DNA, 21 bp, Artificial Sequence
  Description of Artificial Sequence: Synthetic primer
tcatctgttcgtcagggtcca

SEQ ID NO: 3608 - DNA, 20 bp, Artificial Sequence
  Description of Artificial Sequence: Synthetic primer
tcctccgggtaaagtcacca

SEQ ID NO: 3609 - DNA, 51 bp, Artificial Sequence
  Description of Artificial Sequence: Synthetic primer
  Description of Combined DNA/RNA Molecule: Synthetic primer
tcctccgggtaaagtcaccaccgattccttccacttcttacctttgaccag

SEQ ID NO: 3610 - DNA, 26 bp, Artificial Sequence
  Description of Artificial Sequence: Synthetic primer
  Description of Combined DNA/RNA Molecule: Synthetic primer
gcgttcgcgtttttattggtcgtgca

SEQ ID NO: 3611 - DNA, 40 bp, Artificial Sequence
  Description of Artificial Sequence: Synthetic primer
  Description of Combined DNA/RNA Molecule: Synthetic primer
ggtgtcgtggataactacaaaacatcgaaccattaataat

SEQ ID NO: 3612 - DNA, 48 bp, Artificial Sequence
  Description of Artificial Sequence: Synthetic oligonucleotide
  Description of Combined DNA/RNA Molecule: Synthetic oligonucleotide
ttcgtacctcggcacaccagtttttattggtcgtgcgcgtcacgtgcc

SEQ ID NO: 3613 - DNA, 63 bp, Artificial Sequence
  Description of Artificial Sequence: Synthetic oligonucleotide
gtgttcgtttagtagaataataacgcgtaaattatttcgtacgtggctccgttactctgtcga

SEQ ID NO: 3614 - DNA, 41 bp, Artificial Sequence
  Description of Artificial Sequence: Synthetic probe
ttgcgtcacgtgttcgtttagtagaataataacgcgtaaat

SEQ ID NO: 3615 - DNA, 19 bp, Artificial Sequence
  Description of Artificial Sequence: Synthetic primer
ttcgtacctcggcacacca

SEQ ID NO: 3616 - DNA, 20 bp, Artificial Sequence
  Description of Artificial Sequence: Synthetic primer
tcgacagagtaacggagcca

SEQ ID NO: 3617 - DNA, 58 bp, Artificial Sequence
  Description of Artificial Sequence: Synthetic primer
  Description of Combined DNA/RNA Molecule: Synthetic primer
tcgacagagtaacggagccaaactacaaaacatcgaaccattaataacgtatgaaatg

SEQ ID NO: 3618 - DNA, 24 bp, Artificial Sequence
  Description of Artificial Sequence: Synthetic primer
  Description of Combined DNA/RNA Molecule: Synthetic primer
gtttttattggtcgtgcgcgttat

SEQ ID NO: 3619 - DNA, 44 bp, Artificial Sequence
  Description of Artificial Sequence: Synthetic primer
  Description of Combined DNA/RNA Molecule: Synthetic primer
ggtgtcgtgggctaaaaattataactacaaaacatcgaaccatc

SEQ ID NO: 3620 - DNA, 45 bp, Artificial Sequence
  Description of Artificial Sequence: Synthetic oligonucleotide
  Description of Combined DNA/RNA Molecule: Synthetic oligonucleotide
tctacagctagatgcggccagtcgtgcgcgttacgtgctcgttcg

SEQ ID NO: 3621 - DNA, 67 bp, Artificial Sequence
  Description of Artificial Sequence: Synthetic oligonucleotide
gtttagtagaataataacgcgtaaattatttcgtacgttattaatggtggctccgttactctgtcga

SEQ ID NO: 3622 - DNA, 46 bp, Artificial Sequence
  Description of Artificial Sequence: Synthetic probe
cccgtgctcgtttagtagaataataacgcgtaaattatttcgtacg

SEQ ID NO: 3623 - DNA, 20 bp, Artificial Sequence
  Description of Artificial Sequence: Synthetic primer
tctacagctagatgcggcca

SEQ ID NO: 3624 - DNA, 20 bp, Artificial Sequence
  Description of Artificial Sequence: Synthetic primer
tcgacagagtaacggagcca

SEQ ID NO: 3625 - DNA, 36 bp, Artificial Sequence
  Description of Artificial Sequence: Synthetic primer
  Description of Combined DNA/RNA Molecule: Synthetic primer
gttcggattttgtaattatgttttatagttcgggag

SEQ ID NO: 3626 - DNA, 42 bp, Artificial Sequence
  Description of Artificial Sequence: Synthetic primer
  Description of Combined DNA/RNA Molecule: Synthetic primer
ggtgtcgtggccttctataaataatcgcgcatcttaaaacag

SEQ ID NO: 3627 - DNA, 60 bp, Artificial Sequence
  Description of Artificial Sequence: Synthetic oligonucleotide
  Description of Combined DNA/RNA Molecule: Synthetic oligonucleotide
tccagggtatttggcgcacgattttgtaattatgttttatagttcgggaaattgcgggcc

SEQ ID NO: 3628 - DNA, 49 bp, Artificial Sequence
  Description of Artificial Sequence: Synthetic oligonucleotide
gggtttcgtagtatttggttgcggttgcggtgcggaaacctatcgtcga

SEQ ID NO: 3629 - DNA, 32 bp, Artificial Sequence
  Description of Artificial Sequence: Synthetic probe
ttaaattgcgggtttcgtagtatttggttgcg

SEQ ID NO: 3630 - DNA, 19 bp, Artificial Sequence
  Description of Artificial Sequence: Synthetic primer
tccagggtatttggcgcac

SEQ ID NO: 3631 - DNA, 20 bp, Artificial Sequence
  Description of Artificial Sequence: Synthetic primer
tcgacgataggtttccgcac

SEQ ID NO: 3632 - DNA, 57 bp, Artificial Sequence
  Description of Artificial Sequence: Synthetic primer
  Description of Combined DNA/RNA Molecule: Synthetic primer
tcgacgataggtttccgcactaaataatcgcgcatcttaaaacaaaaatttgcaact

SEQ ID NO: 3633 - DNA, 28 bp, Artificial Sequence
  Description of Artificial Sequence: Synthetic primer
  Description of Combined DNA/RNA Molecule: Synthetic primer
gcgtttcgtttaaaggttgtttcgattc

SEQ ID NO: 3634 - DNA, 51 bp, Artificial Sequence
  Description of Artificial Sequence: Synthetic primer
  Description of Combined DNA/RNA Molecule: Synthetic primer
ggtgtcgtggcaaaaaaaattaaaatataataataaaaaaaccgaauttct

SEQ ID NO: 3635 - DNA, 64 bp, Artificial Sequence
  Description of Artificial Sequence: Synthetic oligonucleotide
  Description of Combined DNA/RNA Molecule: Synthetic oligonucleotide
tccctcgtcatctcccttaccgttgattagtgatttgtgtaaaagaaaattattcggtcgttac

SEQ ID NO: 3636 - DNA, 53 bp, Artificial Sequence
  Description of Artificial Sequence: Synthetic oligonucleotide
gttgtttgtttttttagcgtttttttcggttgcgggtcttggtgatggagcga

SEQ ID NO: 3637 - DNA, 37 bp, Artificial Sequence
  Description of Artificial Sequence: Synthetic probe
ccttcggtcgttgtttgtttttttagcgtttttttcg

SEQ ID NO: 3638 - DNA, 21 bp, Artificial Sequence
  Description of Artificial Sequence: Synthetic primer
tccctcgtcatctcccttacc

SEQ ID NO: 3639 - DNA, 19 bp, Artificial Sequence
  Description of Artificial Sequence: Synthetic primer
tcgctccatcaccaagacc

SEQ ID NO: 3640 - DNA, 66 bp, Artificial Sequence
  Description of Artificial Sequence: Synthetic primer
  Description of Combined DNA/RNA Molecule: Synthetic primer
tcgctccatcaccaagacccaaaaaaaattaaaatataataataaaaaaaccgaatttctgcaact

SEQ ID NO: 3641 - DNA, 30 bp, Artificial Sequence
  Description of Artificial Sequence: Synthetic primer
  Description of Combined DNA/RNA Molecule: Synthetic primer
cgggtttagtttattggttgtagtcgagga

SEQ ID NO: 3642 - DNA, 33 bp, Artificial Sequence
  Description of Artificial Sequence: Synthetic primer
  Description of Combined DNA/RNA Molecule: Synthetic primer
ggtgtcgtggataccccgaaccaccaacccatt

SEQ ID NO: 3643 - DNA, 56 bp, Artificial Sequence
  Description of Artificial Sequence: Synthetic oligonucleotide
  Description of Combined DNA/RNA Molecule: Synthetic oligonucleotide
tcataatgttgtcagcccgaccgtttattggttgtagtcgagaggtttgtcgagaa

SEQ ID NO: 3644 - DNA, 67 bp, Artificial Sequence
  Description of Artificial Sequence: Synthetic oligonucleotide
gagggtagcggtttttgataggatttgtttttttaattttttggatagggtcttggtgatggagcga

SEQ ID NO: 3645 - DNA, 36 bp, Artificial Sequence
  Description of Artificial Sequence: Synthetic probe
ttgtttgtcgagggtagcggtttttgataggatttg

SEQ ID NO: 3646 - DNA, 22 bp, Artificial Sequence
  Description of Artificial Sequence: Synthetic primer
tcataatgttgtcagcccgacc

SEQ ID NO: 3647 - DNA, 19 bp, Artificial Sequence
  Description of Artificial Sequence: Synthetic primer
tcgctccatcaccaagacc

SEQ ID NO: 3648 - DNA, 44 bp, Artificial Sequence
  Description of Artificial Sequence: Synthetic primer
  Description of Combined DNA/RNA Molecule: Synthetic primer
tcgctccatcaccaagacccgaaccaccaacccatcctgcaaag

SEQ ID NO: 3649 - DNA, 25 bp, Artificial Sequence
  Description of Artificial Sequence: Synthetic primer
  Description of Combined DNA/RNA Molecule: Synthetic primer
tgtttgggaaggaagtttgcgggtc

SEQ ID NO: 3650 - DNA, 44 bp, Artificial Sequence
  Description of Artificial Sequence: Synthetic primer
  Description of Combined DNA/RNA Molecule: Synthetic primer
ggtgtcgtggcacgcaactaatacgaaaaaaataaataactaag

SEQ ID NO: 3651 - DNA, 52 bp, Artificial Sequence
  Description of Artificial Sequence: Synthetic oligonucleotide
  Description of Combined DNA/RNA Molecule: Synthetic oligonucleotide
tacgaatcacccgagagttcaagggaaggaagtttgcgggttttctcgggcc

SEQ ID NO: 3652 - DNA, 69 bp, Artificial Sequence
  Description of Artificial Sequence: Synthetic oligonucleotide
gggtttcgttgtagtttagttaggttaattaattagtagtcgtttagttgtgggtgggtataggtcaga

SEQ ID NO: 3653 - DNA, 39 bp, Artificial Sequence
  Description of Artificial Sequence: Synthetic probe
ttttttctcgggtttcgttgtagtttagttaggttaatt

SEQ ID NO: 3654 - DNA, 22 bp, Artificial Sequence
  Description of Artificial Sequence: Synthetic primer
tacgaatcacccgagagttcaa

SEQ ID NO: 3655 - DNA, 22 bp, Artificial Sequence
  Description of Artificial Sequence: Synthetic primer
tctgacctatacccacccacaa

SEQ ID NO: 3656 - DNA, 63 bp, Artificial Sequence
  Description of Artificial Sequence: Synthetic primer
  Description of Combined DNA/RNA Molecule: Synthetic primer
tctgacctatacccacccacaacacgcaactaatacgaaaaaaataaataactaaatgactat

SEQ ID NO: 3657 - DNA, 29 bp, Artificial Sequence
  Description of Artificial Sequence: Synthetic primer
  Description of Combined DNA/RNA Molecule: Synthetic primer
gaggttgtagtttgcgaattagtcggtga

SEQ ID NO: 3658 - DNA, 36 bp, Artificial Sequence
  Description of Artificial Sequence: Synthetic primer
  Description of Combined DNA/RNA Molecule: Synthetic primer
ggtgtcgtggattttaaaacgtcccgcactcccact

SEQ ID NO: 3659 - DNA, 48 bp, Artificial Sequence
  Description of Artificial Sequence: Synthetic oligonucleotide
  Description of Combined DNA/RNA Molecule: Synthetic oligonucleotide
tacgaatcacccgagagttcaagaattagtcggtggttcgagcgtcaa

SEQ ID NO: 3660 - DNA, 42 bp, Artificial Sequence
  Description of Artificial Sequence: Synthetic oligonucleotide
gtcggcggagagttgttcggttgtgggtgggtataggtcaga

SEQ ID NO: 3661 - DNA, 21 bp, Artificial Sequence
  Description of Artificial Sequence: Synthetic probe
ccttcgagcgtcggcggagag

SEQ ID NO: 3662 - DNA, 22 bp, Artificial Sequence
  Description of Artificial Sequence: Synthetic primer
tacgaatcacccgagagttcaa

SEQ ID NO: 3663 - DNA, 22 bp, Artificial Sequence
  Description of Artificial Sequence: Synthetic primer
tctgacctatacccacccacaa

SEQ ID NO: 3664 - DNA, 50 bp, Artificial Sequence
  Description of Artificial Sequence: Synthetic primer
  Description of Combined DNA/RNA Molecule: Synthetic primer
tctgacctatacccacccacaacaacattacactatccgccgctgaacag

SEQ ID NO: 3665 - DNA, 33 bp, Artificial Sequence
  Description of Artificial Sequence: Synthetic primer
  Description of Combined DNA/RNA Molecule: Synthetic primer
atttttattcggattggttagtttttgcggaaa

SEQ ID NO: 3666 - DNA, 32 bp, Artificial Sequence
  Description of Artificial Sequence: Synthetic primer
  Description of Combined DNA/RNA Molecule: Synthetic primer
ggtgtcgtggcttcgccacgcaacaacctaag

SEQ ID NO: 3667 - DNA, 52 bp, Artificial Sequence
  Description of Artificial Sequence: Synthetic oligonucleotide
  Description of Combined DNA/RNA Molecule: Synthetic oligonucleotide
taggaacacggaggacatcaaggttagtttttgcggaagtagcgctcgggcc

SEQ ID NO: 3668 - DNA, 54 bp, Artificial Sequence
  Description of Artificial Sequence: Synthetic oligonucleotide
gggttttcgggtaacgtttgaagagttggtagttgtgggtgggtataggtcaga

SEQ ID NO: 3669 - DNA, 25 bp, Artificial Sequence
  Description of Artificial Sequence: Synthetic probe
aaagcgctcgggttttcgggtaacg

SEQ ID NO: 3670 - DNA, 21 bp, Artificial Sequence
  Description of Artificial Sequence: Synthetic primer
taggaacacggaggacatcaa

SEQ ID NO: 3671 - DNA, 22 bp, Artificial Sequence
  Description of Artificial Sequence: Synthetic primer
tctgacctatacccacccacaa

SEQ ID NO: 3672 - DNA, 49 bp, Artificial Sequence
  Description of Artificial Sequence: Synthetic primer
  Description of Combined DNA/RNA Molecule: Synthetic primer
tctgacctatacccacccacaacgccacgcaacaacctaaaatgctact

SEQ ID NO: 3673 - DNA, 21 bp, Artificial Sequence
  Description of Artificial Sequence: Synthetic primer
  Description of Combined DNA/RNA Molecule: Synthetic primer
gggcggaaagcgatacggtta

SEQ ID NO: 3674 - DNA, 39 bp, Artificial Sequence
  Description of Artificial Sequence: Synthetic primer
  Description of Combined DNA/RNA Molecule: Synthetic primer
ggtgtcgtggtccaaaacctctcttcgatttatcuccat

SEQ ID NO: 3675 - DNA, 48 bp, Artificial Sequence
  Description of Artificial Sequence: Synthetic oligonucleotide
  Description of Combined DNA/RNA Molecule: Synthetic oligonucleotide
tctcataaacactccggccacgaaagcgatacggttgggagacgatcg

SEQ ID NO: 3676 - DNA, 67 bp, Artificial Sequence
  Description of Artificial Sequence: Synthetic oligonucleotide
gattacgtgtttttttaatttttttttcgttgttagtaaggaagtgggtggctcaataacgggcaga

SEQ ID NO: 3677 - DNA, 44 bp, Artificial Sequence
  Description of Artificial Sequence: Synthetic probe
aagggagacgattacgtgtttttttaatttttttttcgttgtta

SEQ ID NO: 3678 - DNA, 21 bp, Artificial Sequence
  Description of Artificial Sequence: Synthetic primer
tctcataaacactccggccac

SEQ ID NO: 3679 - DNA, 20 bp, Artificial Sequence
  Description of Artificial Sequence: Synthetic primer
tctgcccgttattgagccac

SEQ ID NO: 3680 - DNA, 29 bp, Artificial Sequence
  Description of Artificial Sequence: Synthetic primer
  Description of Combined DNA/RNA Molecule: Synthetic primer
attttttagggaatgaatggttgcgatac

SEQ ID NO: 3681 - DNA, 36 bp, Artificial Sequence
  Description of Artificial Sequence: Synthetic primer
  Description of Combined DNA/RNA Molecule: Synthetic primer
ggtgtcgtggaaacgcaaatcctcgttcaaaaaaac

SEQ ID NO: 3682 - DNA, 46 bp, Artificial Sequence
  Description of Artificial Sequence: Synthetic oligonucleotide
  Description of Combined DNA/RNA Molecule: Synthetic oligonucleotide
ttgattgggatcgttcgcacgcgatatgaggttcgacgaacgttcc

SEQ ID NO: 3683 - DNA, 55 bp, Artificial Sequence
  Description of Artificial Sequence: Synthetic oligonucleotide
gtttttttcgcgggtattattagtacgcgtacgacgtggctcaataacgggcaga

SEQ ID NO: 3684 - DNA, 37 bp, Artificial Sequence
  Description of Artificial Sequence: Synthetic probe
aagacgaacgtttttttcgcgggtattattagtacgc

SEQ ID NO: 3685 - DNA, 20 bp, Artificial Sequence
  Description of Artificial Sequence: Synthetic primer
ttgattgggatcgttcgcac

SEQ ID NO: 3686 - DNA, 20 bp, Artificial Sequence
  Description of Artificial Sequence: Synthetic primer
tctgcccgttattgagccac

SEQ ID NO: 3687 - DNA, 57 bp, Artificial Sequence
  Description of Artificial Sequence: Synthetic primer
  Description of Combined DNA/RNA Molecule: Synthetic primer
tctgcccgttattgagccaccctcgttcaaaaaaatataatccttaccgttguacgt

SEQ ID NO: 3688 - DNA, 28 bp, Artificial Sequence
  Description of Artificial Sequence: Synthetic primer
  Description of Combined DNA/RNA Molecule: Synthetic primer
gcggtagtgagaatgagtttttcgagac

SEQ ID NO: 3689 - DNA, 35 bp, Artificial Sequence; identical to SEQ ID NO: 3011
  Description of Artificial Sequence: Synthetic primer
  Description of Combined DNA/RNA Molecule: Synthetic primer

SEQ ID NO: 3690 - DNA, 56 bp, Artificial Sequence; identical to SEQ ID NO: 3012
  Description of Artificial Sequence: Synthetic oligonucleotide
  Description of Combined DNA/RNA Molecule: Synthetic oligonucleotide

SEQ ID NO: 3691 - DNA, 65 bp, Artificial Sequence; identical to SEQ ID NO: 3013
  Description of Artificial Sequence: Synthetic oligonucleotide

SEQ ID NO: 3692 - DNA, 44 bp, Artificial Sequence; identical to SEQ ID NO: 3014
  Description of Artificial Sequence: Synthetic probe

SEQ ID NO: 3693 - DNA, 21 bp, Artificial Sequence
  Description of Artificial Sequence: Synthetic primer
tctgcccaaaatactgcacaa

SEQ ID NO: 3694 - DNA, 21 bp, Artificial Sequence
  Description of Artificial Sequence: Synthetic primer
tgaacaccgcctcagtttcaa

SEQ ID NO: 3695 - DNA, 51 bp, Artificial Sequence; identical to SEQ ID NO: 3017
  Description of Artificial Sequence: Synthetic primer
  Description of Combined DNA/RNA Molecule: Synthetic primer

SEQ ID NO: 3696 - DNA, 25 bp, Artificial Sequence
  Description of Artificial Sequence: Synthetic primer
  Description of Combined DNA/RNA Molecule: Synthetic primer
cgttgagggtgaggatattcgtttc

SEQ ID NO: 3697 - DNA, 36 bp, Artificial Sequence
  Description of Artificial Sequence: Synthetic primer
  Description of Combined DNA/RNA Molecule: Synthetic primer
ggtgtcgtggaaaaatcgccgacttctacgauaaag

SEQ ID NO: 3698 - DNA, 48 bp, Artificial Sequence
  Description of Artificial Sequence: Synthetic oligonucleotide
  Description of Combined DNA/RNA Molecule: Synthetic oligonucleotide
tatggactgtaccagcccaagggtgaggatattcgttttgagcgttcc

SEQ ID NO: 3699 - DNA, 61 bp, Artificial Sequence
  Description of Artificial Sequence: Synthetic oligonucleotide
gttttttcgtgttggaaatagtaggttgcggtttttatcgttgaaactgaggcggtgttca

SEQ ID NO: 3700 - DNA, 38 bp, Artificial Sequence
  Description of Artificial Sequence: Synthetic probe
cctttgagcgttttttcgtgttggaaatagtaggttgc

SEQ ID NO: 3701 - DNA, 20 bp, Artificial Sequence
  Description of Artificial Sequence: Synthetic primer
tatggactgtaccagcccaa

SEQ ID NO: 3702 - DNA, 21 bp, Artificial Sequence
  Description of Artificial Sequence: Synthetic primer
tgaacaccgcctcagtttcaa

SEQ ID NO: 3703 - DNA, 52 bp, Artificial Sequence
  Description of Artificial Sequence: Synthetic primer
  Description of Combined DNA/RNA Molecule: Synthetic primer
tgaacaccgcctcagtttcaaaaatcgccgacttctacgataaaatgataag

SEQ ID NO: 3704 - DNA, 21 bp, Artificial Sequence
  Description of Artificial Sequence: Synthetic primer
  Description of Combined DNA/RNA Molecule: Synthetic primer
gtggagtcgaggaggcgggac

SEQ ID NO: 3705 - DNA, 39 bp, Artificial Sequence
  Description of Artificial Sequence: Synthetic primer
  Description of Combined DNA/RNA Molecule: Synthetic primer
ggtgtcgtggacaacgacaaaaaaaacaaaaaccccatg

SEQ ID NO: 3706 - DNA, 55 bp, Artificial Sequence
  Description of Artificial Sequence: Synthetic oligonucleotide
  Description of Combined DNA/RNA Molecule: Synthetic oligonucleotide
tttgcctcttgtaggtgccagaggttgcgggtttttttatttttagaatcggtcc

SEQ ID NO: 3707 - DNA, 50 bp, Artificial Sequence
  Description of Artificial Sequence: Synthetic oligonucleotide
ggttttggttttttggcgcggagttttttagtgggcaacgcggatattca

SEQ ID NO: 3708 - DNA, 30 bp, Artificial Sequence
  Description of Artificial Sequence: Synthetic probe
aatagaatcggttttggttttttggcgcgg

SEQ ID NO: 3709 - DNA, 20 bp, Artificial Sequence
  Description of Artificial Sequence: Synthetic primer
tttgcctcttgtaggtgcca

SEQ ID NO: 3710 - DNA, 19 bp, Artificial Sequence
  Description of Artificial Sequence: Synthetic primer
tgaatatccgcgttgccca

SEQ ID NO: 3711 - DNA, 52 bp, Artificial Sequence
  Description of Artificial Sequence: Synthetic primer
  Description of Combined DNA/RNA Molecule: Synthetic primer
tgaatatccgcgttgcccaaaacaaaaaccccataacaaaaaacctgaactg

SEQ ID NO: 3712 - DNA, 29 bp, Artificial Sequence
  Description of Artificial Sequence: Synthetic primer
  Description of Combined DNA/RNA Molecule: Synthetic primer
taggacgtttttagtgtcgttagcggttc

SEQ ID NO: 3713 - DNA, 35 bp, Artificial Sequence
  Description of Artificial Sequence: Synthetic primer
  Description of Combined DNA/RNA Molecule: Synthetic primer
ggtgtcgtggccaaaacgcgataaacgcaauctat

SEQ ID NO: 3714 - DNA, 50 bp, Artificial Sequence
  Description of Artificial Sequence: Synthetic oligonucleotide
  Description of Combined DNA/RNA Molecule: Synthetic oligonucleotide
tgtcgcccggtagcaataaactcgttagcggtttttaagggattcggaat

SEQ ID NO: 3715 - DNA, 44 bp, Artificial Sequence
  Description of Artificial Sequence: Synthetic oligonucleotide
ggagcgtttcggagagggatgggtttccgcgatctttgcattca

SEQ ID NO: 3716 - DNA, 24 bp, Artificial Sequence
  Description of Artificial Sequence: Synthetic probe
ttgggattcggagcgtttcggaga

SEQ ID NO: 3717 - DNA, 21 bp, Artificial Sequence
  Description of Artificial Sequence: Synthetic primer
tgtcgcccggtagcaataaac

SEQ ID NO: 3718 - DNA, 22 bp, Artificial Sequence
  Description of Artificial Sequence: Synthetic primer
tgaatgcaaagatcgcggaaac

SEQ ID NO: 3719 - DNA, 26 bp, Artificial Sequence
  Description of Artificial Sequence: Synthetic primer
  Description of Combined DNA/RNA Molecule: Synthetic primer
gattttcgaggcgtaggattcggttc

SEQ ID NO: 3720 - DNA, 34 bp, Artificial Sequence
  Description of Artificial Sequence: Synthetic primer
  Description of Combined DNA/RNA Molecule: Synthetic primer
ggtgtcgtggtaaaaaacgcccgaccctacgatg

SEQ ID NO: 3721 - DNA, 51 bp, Artificial Sequence
  Description of Artificial Sequence: Synthetic oligonucleotide
  Description of Combined DNA/RNA Molecule: Synthetic oligonucleotide
tgtgcactagtccacgtgaaacttcggttttgttgttgcgttcatcgcgag

SEQ ID NO: 3722 - DNA, 56 bp, Artificial Sequence
  Description of Artificial Sequence: Synthetic oligonucleotide
gcggattttcgttagggtttttgtaggtatcgttgtttccgcgatctttgcattca

SEQ ID NO: 3723 - DNA, 34 bp, Artificial Sequence
  Description of Artificial Sequence: Synthetic probe
ttgttcatcgcggattttcgttagggtttttgta

SEQ ID NO: 3724 - DNA, 22 bp, Artificial Sequence
  Description of Artificial Sequence: Synthetic primer
tgtgcactagtccacgtgaaac

SEQ ID NO: 3725 - DNA, 22 bp, Artificial Sequence
  Description of Artificial Sequence: Synthetic primer
tgaatgcaaagatcgcggaaac

SEQ ID NO: 3726 - DNA, 52 bp, Artificial Sequence
  Description of Artificial Sequence: Synthetic primer
  Description of Combined DNA/RNA Molecule: Synthetic primer
tgaatgcaaagatcgcggaaaccgcccgaccctacgatataaaaatgatact

SEQ ID NO: 3727 - DNA, 25 bp, Artificial Sequence
  Description of Artificial Sequence: Synthetic primer
  Description of Combined DNA/RNA Molecule: Synthetic primer
gagttggtttttggcggatcgagtc

SEQ ID NO: 3728 - DNA, 31 bp, Artificial Sequence
  Description of Artificial Sequence: Synthetic primer
  Description of Combined DNA/RNA Molecule: Synthetic primer
ggtgtcgtggacgccccaacgaaaccuaacg

SEQ ID NO: 3729 - DNA, 53 bp, Artificial Sequence
  Description of Artificial Sequence: Synthetic oligonucleotide
  Description of Combined DNA/RNA Molecule: Synthetic oligonucleotide
tacagatacggacgggaatcaagtttttggcggatcgagttttggctcggtta

SEQ ID NO: 3730 - DNA, 46 bp, Artificial Sequence
  Description of Artificial Sequence: Synthetic oligonucleotide
ggtcgattggacgttcggagttggttgtttacatcctcctgcgtca

SEQ ID NO: 3731 - DNA, 26 bp, Artificial Sequence
  Description of Artificial Sequence: Synthetic probe
aattggctcggtcgattggacgttcg

SEQ ID NO: 3732 - DNA, 22 bp, Artificial Sequence
  Description of Artificial Sequence: Synthetic primer
tacagatacggacgggaatcaa

SEQ ID NO: 3733 - DNA, 22 bp, Artificial Sequence
  Description of Artificial Sequence: Synthetic primer
tgacgcaggaggatgtaaacaa

SEQ ID NO: 3734 - DNA, 49 bp, Artificial Sequence
  Description of Artificial Sequence: Synthetic primer
  Description of Combined DNA/RNA Molecule: Synthetic primer
tgacgcaggaggatgtaaacaagccccaacgaaacctaacaatgcccct

SEQ ID NO: 3735 - DNA, 24 bp, Artificial Sequence
  Description of Artificial Sequence: Synthetic primer
  Description of Combined DNA/RNA Molecule: Synthetic primer
cgggttgtatagagaggtcggata

SEQ ID NO: 3736 - DNA, 30 bp, Artificial Sequence
  Description of Artificial Sequence: Synthetic primer
  Description of Combined DNA/RNA Molecule: Synthetic primer
ggtgtcgtggaacccctctcccgccaccca

SEQ ID NO: 3737 - DNA, 42 bp, Artificial Sequence
  Description of Artificial Sequence: Synthetic oligonucleotide
  Description of Combined DNA/RNA Molecule: Synthetic oligonucleotide
ttggcgcaacggtttccaaagaggtcggatgtggagcgagcc

SEQ ID NO: 3738 - DNA, 56 bp, Artificial Sequence
  Description of Artificial Sequence: Synthetic oligonucleotide
gagttgggtagaggaagaggaatcgtagatgtcgttgtttacatcctcctgcgtca

SEQ ID NO: 3739 - DNA, 29 bp, Artificial Sequence
  Description of Artificial Sequence: Synthetic probe
ccgtggagcgagttgggtagaggaagagg

SEQ ID NO: 3740 - DNA, 19 bp, Artificial Sequence
  Description of Artificial Sequence: Synthetic primer
ttggcgcaacggtttccaa

SEQ ID NO: 3741 - DNA, 22 bp, Artificial Sequence
  Description of Artificial Sequence: Synthetic primer
tgacgcaggaggatgtaaacaa

SEQ ID NO: 3742 - DNA, 46 bp, Artificial Sequence
  Description of Artificial Sequence: Synthetic primer
  Description of Combined DNA/RNA Molecule: Synthetic primer
tgacgcaggaggatgtaaacaaccgccacccgacatctatgattct

SEQ ID NO: 3743 - DNA, 27 bp, Artificial Sequence
  Description of Artificial Sequence: Synthetic primer
  Description of Combined DNA/RNA Molecule: Synthetic primer
ttaagatcgatttcgaggttgcgggac

SEQ ID NO: 3744 - DNA, 41 bp, Artificial Sequence
  Description of Artificial Sequence: Synthetic primer
  Description of Combined DNA/RNA Molecule: Synthetic primer
ggtgtcgtggcctaacaacctacgaaaattttaaccucaat

SEQ ID NO: 3745 - DNA, 52 bp, Artificial Sequence
  Description of Artificial Sequence: Synthetic oligonucleotide
  Description of Combined DNA/RNA Molecule: Synthetic oligonucleotide
ttcagcagcctggcatcaccgaggttgcgggatttgtagagattctcgatct

SEQ ID NO: 3746 - DNA, 56 bp, Artificial Sequence
  Description of Artificial Sequence: Synthetic oligonucleotide
gattcgggagagttttaggcgtttttatttggttttagtggagcgctaaggttgca

SEQ ID NO: 3747 - DNA, 36 bp, Artificial Sequence
  Description of Artificial Sequence: Synthetic probe
ttgattctcgattcgggagagttttaggcgttttta

SEQ ID NO: 3748 - DNA, 19 bp, Artificial Sequence
  Description of Artificial Sequence: Synthetic primer
ttcagcagcctggcatcac

SEQ ID NO: 3749 - DNA, 19 bp, Artificial Sequence
  Description of Artificial Sequence: Synthetic primer
tgcaaccttagcgctccac

SEQ ID NO: 3750 - DNA, 24 bp, Artificial Sequence
  Description of Artificial Sequence: Synthetic primer
  Description of Combined DNA/RNA Molecule: Synthetic primer
gttaggagtagtcggcgtcgtttc

SEQ ID NO: 3751 - DNA, 41 bp, Artificial Sequence
  Description of Artificial Sequence: Synthetic primer
  Description of Combined DNA/RNA Molecule: Synthetic primer
ggtgtcgtggcaaaaataaaacaaaacgaacgaaaaatatg

SEQ ID NO: 3752 - DNA, 45 bp, Artificial Sequence
  Description of Artificial Sequence: Synthetic oligonucleotide
  Description of Combined DNA/RNA Molecule: Synthetic oligonucleotide
ttgttcgcccgttggtcacgtagtcggcgtcgtttttagcgtacc

SEQ ID NO: 3753 - DNA, 67 bp, Artificial Sequence
  Description of Artificial Sequence: Synthetic oligonucleotide
gtattcgggtttattttttatagtatttttaacgatttcgaggtttaggtggagcgctaaggttgca

SEQ ID NO: 3754 - DNA, 47 bp, Artificial Sequence
  Description of Artificial Sequence: Synthetic probe
ccttttagcgtattcgggtttattttttatagtatttttaacgattt

SEQ ID NO: 3755 - DNA, 19 bp, Artificial Sequence
  Description of Artificial Sequence: Synthetic primer
ttgttcgcccgttggtcac

SEQ ID NO: 3756 - DNA, 19 bp, Artificial Sequence
  Description of Artificial Sequence: Synthetic primer
tgcaaccttagcgctccac

SEQ ID NO: 3757 - DNA, 55 bp, Artificial Sequence
  Description of Artificial Sequence: Synthetic primer
  Description of Combined DNA/RNA Molecule: Synthetic primer
tgcaaccttagcgctccaccaaaacgaacgaaaaatataactaaaccctgaaatt

SEQ ID NO: 3758 - DNA, 23 bp, Artificial Sequence
  Description of Artificial Sequence: Synthetic primer
  Description of Combined DNA/RNA Molecule: Synthetic primer
gttaggcgaggttttgtcgggac

SEQ ID NO: 3759 - DNA, 36 bp, Artificial Sequence
  Description of Artificial Sequence: Synthetic primer
  Description of Combined DNA/RNA Molecule: Synthetic primer
ggtgtcgtgggccctcgctaaaaaaaacgacccgat

SEQ ID NO: 3760 - DNA, 47 bp, Artificial Sequence
  Description of Artificial Sequence: Synthetic oligonucleotide
  Description of Combined DNA/RNA Molecule: Synthetic oligonucleotide
tatcgcatcaaatggagagcaaggttttgtcgaggtttgagcgggac

SEQ ID NO: 3761 - DNA, 41 bp, Artificial Sequence
  Description of Artificial Sequence: Synthetic oligonucleotide
ggagttggcggaggagtcgttgaccgctgttatacgttgca

SEQ ID NO: 3762 - DNA, 23 bp, Artificial Sequence
  Description of Artificial Sequence: Synthetic probe
cctttgagcggagttggcggagg

SEQ ID NO: 3763 - DNA, 22 bp, Artificial Sequence
  Description of Artificial Sequence: Synthetic primer
tatcgcatcaaatggagagcaa

SEQ ID NO: 3764 - DNA, 22 bp, Artificial Sequence
  Description of Artificial Sequence: Synthetic primer
tgcaacgtataacagcggtcaa

SEQ ID NO: 3765 - DNA, 50 bp, Artificial Sequence
  Description of Artificial Sequence: Synthetic primer
  Description of Combined DNA/RNA Molecule: Synthetic primer
tgcaacgtataacagcggtcaaccctcgctaaaaaaaacgacctgaccct

SEQ ID NO: 3766 - DNA, 25 bp, Artificial Sequence
  Description of Artificial Sequence: Synthetic primer
  Description of Combined DNA/RNA Molecule: Synthetic primer
gggtgatagtattcggtggcgttag

SEQ ID NO: 3767 - DNA, 35 bp, Artificial Sequence
  Description of Artificial Sequence: Synthetic primer
  Description of Combined DNA/RNA Molecule: Synthetic primer
ggtgtcgtggcgaacctttacgctttacgcuccgc

SEQ ID NO: 3768 - DNA, 48 bp, Artificial Sequence
  Description of Artificial Sequence: Synthetic oligonucleotide
  Description of Combined DNA/RNA Molecule: Synthetic oligonucleotide
tcctagtacctacagtgggcaaggtggcgttaagggatttagcgggaa

SEQ ID NO: 3769 - DNA, 44 bp, Artificial Sequence
  Description of Artificial Sequence: Synthetic oligonucleotide
gggagttaggtcggagggagggttgaccgctgttatacgttgca

SEQ ID NO: 3770 - DNA, 29 bp, Artificial Sequence
  Description of Artificial Sequence: Synthetic probe
ttatttagcgggagttaggtcggagggag

SEQ ID NO: 3771 - DNA, 22 bp, Artificial Sequence
  Description of Artificial Sequence: Synthetic primer
tcctagtacctacagtgggcaa

SEQ ID NO: 3772 - DNA, 22 bp, Artificial Sequence
  Description of Artificial Sequence: Synthetic primer
tgcaacgtataacagcggtcaa

SEQ ID NO: 3773 - DNA, 50 bp, Artificial Sequence
  Description of Artificial Sequence: Synthetic primer
  Description of Combined DNA/RNA Molecule: Synthetic primer
tgcaacgtataacagcggtcaagaacctttacgctttacgctctguaact

SEQ ID NO: 3774 - DNA, 26 bp, Artificial Sequence
  Description of Artificial Sequence: Synthetic primer
  Description of Combined DNA/RNA Molecule: Synthetic primer
cgcgagtttttttggagtttcggtca

SEQ ID NO: 3775 - DNA, 42 bp, Artificial Sequence
  Description of Artificial Sequence: Synthetic primer
  Description of Combined DNA/RNA Molecule: Synthetic primer
ggtgtcgtggaaacaccaaaaaaaactaaaacgaaacactag

SEQ ID NO: 3776 - DNA, 55 bp, Artificial Sequence
  Description of Artificial Sequence: Synthetic oligonucleotide
  Description of Combined DNA/RNA Molecule: Synthetic oligonucleotide
tagtttgtcgaaagtcccacaccgagtttttttggagtttcggtcgtctcgttcg

SEQ ID NO: 3777 - DNA, 56 bp, Artificial Sequence
  Description of Artificial Sequence: Synthetic oligonucleotide
gtttagtggttttgtgtagcgtttttcgttcggaggtgcaaaattcaggctgtgca

SEQ ID NO: 3778 - DNA, 32 bp, Artificial Sequence
  Description of Artificial Sequence: Synthetic probe
tttcgtctcgtttagtggttttgtgtagcgtt

SEQ ID NO: 3779 - DNA, 22 bp, Artificial Sequence
  Description of Artificial Sequence: Synthetic primer
tagtttgtcgaaagtcccacac

SEQ ID NO: 3780 - DNA, 21 bp, Artificial Sequence
  Description of Artificial Sequence: Synthetic primer
tgcacagcctgaattttgcac

SEQ ID NO: 3781 - DNA, 56 bp, Artificial Sequence
  Description of Artificial Sequence: Synthetic primer
  Description of Combined DNA/RNA Molecule: Synthetic primer
tgcacagcctgaattttgcacactaaaacgaaacactaaattctccgaatgaaaag

SEQ ID NO: 3782 - DNA, 22 bp, Artificial Sequence
  Description of Artificial Sequence: Synthetic primer
  Description of Combined DNA/RNA Molecule: Synthetic primer
cgcgtagttttcgggtcgtttc

SEQ ID NO: 3783 - DNA, 42 bp, Artificial Sequence
  Description of Artificial Sequence: Synthetic primer
  Description of Combined DNA/RNA Molecule: Synthetic primer
ggtgtcgtggcccaaaaaaaaaaacgacgaaaaaaataaaag

SEQ ID NO: 3784 - DNA, 50 bp, Artificial Sequence
  Description of Artificial Sequence: Synthetic oligonucleotide
  Description of Combined DNA/RNA Molecule: Synthetic oligonucleotide
tagacacgagcgaggtcaccgggtcgtttttttacgttttcgaacgtcag

SEQ ID NO: 3785 - DNA, 59 bp, Artificial Sequence
  Description of Artificial Sequence: Synthetic oligonucleotide
gtcgatcgtcgatttatatttttgcgttcgtagttagggtgcaaaattcaggctgtgca

SEQ ID NO: 3786 - DNA, 37 bp, Artificial Sequence
  Description of Artificial Sequence: Synthetic probe
aattcgaacgtcgatcgtcgatttatatttttgcgtt

SEQ ID NO: 3787 - DNA, 19 bp, Artificial Sequence
  Description of Artificial Sequence: Synthetic primer
tagacacgagcgaggtcac

SEQ ID NO: 3788 - DNA, 21 bp, Artificial Sequence
  Description of Artificial Sequence: Synthetic primer
tgcacagcctgaattttgcac

SEQ ID NO: 3789 - DNA, 61 bp, Artificial Sequence
  Description of Artificial Sequence: Synthetic primer
  Description of Combined DNA/RNA Molecule: Synthetic primer
tgcacagcctgaattttgcacaaaaacgacgaaaaaaataaaaaatcctaactatgaacgt

SEQ ID NO: 3790 - DNA, 22 bp, Artificial Sequence
  Description of Artificial Sequence: Synthetic primer
  Description of Combined DNA/RNA Molecule: Synthetic primer
tttggcgggcgagtatcgtttc

SEQ ID NO: 3791 - DNA, 40 bp, Artificial Sequence
  Description of Artificial Sequence: Synthetic primer
  Description of Combined DNA/RNA Molecule: Synthetic primer
ggtgtcgtggtctatttctcgttcgcgatctaaaaucgct

SEQ ID NO: 3792 - DNA, 59 bp, Artificial Sequence
  Description of Artificial Sequence: Synthetic oligonucleotide
  Description of Combined DNA/RNA Molecule: Synthetic oligonucleotide
ttcttcacagtaccgccacagcgggcgagtatcgtttttatataaattattggcgttga

SEQ ID NO: 3793 - DNA, 57 bp, Artificial Sequence
  Description of Artificial Sequence: Synthetic oligonucleotide
gttagagtttcgggaaaaggcgtattttttattgttggtgtgttgtctggtggtgca

SEQ ID NO: 3794 - DNA, 31 bp, Artificial Sequence
  Description of Artificial Sequence: Synthetic probe
cctattggcgttagagtttcgggaaaaggcg

SEQ ID NO: 3795 - DNA, 20 bp, Artificial Sequence
  Description of Artificial Sequence: Synthetic primer
ttcttcacagtaccgccaca

SEQ ID NO: 3796 - DNA, 19 bp, Artificial Sequence
  Description of Artificial Sequence: Synthetic primer
tgcaccaccagacaacaca

SEQ ID NO: 3797 - DNA, 52 bp, Artificial Sequence
  Description of Artificial Sequence: Synthetic primer
  Description of Combined DNA/RNA Molecule: Synthetic primer
tgcaccaccagacaacacatctatttctcgttcgcgatctaaaattgccctg

SEQ ID NO: 3798 - DNA, 25 bp, Artificial Sequence
  Description of Artificial Sequence: Synthetic primer
  Description of Combined DNA/RNA Molecule: Synthetic primer
ggtcgaggaagtcgagtttcgaggc

SEQ ID NO: 3799 - DNA, 37 bp, Artificial Sequence
  Description of Artificial Sequence: Synthetic primer
  Description of Combined DNA/RNA Molecule: Synthetic primer
ggtgtcgtggccgttataaaaaccgaacccgaccgca

SEQ ID NO: 3800 - DNA, 53 bp, Artificial Sequence
  Description of Artificial Sequence: Synthetic oligonucleotide
  Description of Combined DNA/RNA Molecule: Synthetic oligonucleotide
taccctcctagctccgtacagaggaagtcgagtttcgaggtttttggcgtcac

SEQ ID NO: 3801 - DNA, 57 bp, Artificial Sequence
  Description of Artificial Sequence: Synthetic oligonucleotide
gtcgttttaggaggaattttgcgggttattagaagttgtgtgttgtctggtggtgca

SEQ ID NO: 3802 - DNA, 32 bp, Artificial Sequence
  Description of Artificial Sequence: Synthetic probe
aattttggcgtcgttttaggaggaattttgcg

SEQ ID NO: 3803 - DNA, 20 bp, Artificial Sequence
  Description of Artificial Sequence: Synthetic primer
taccctcctagctccgtaca

SEQ ID NO: 3804 - DNA, 19 bp, Artificial Sequence
  Description of Artificial Sequence: Synthetic primer
tgcaccaccagacaacaca

SEQ ID NO: 3805 - DNA, 49 bp, Artificial Sequence
  Description of Artificial Sequence: Synthetic primer
  Description of Combined DNA/RNA Molecule: Synthetic primer
tgcaccaccagacaacacaccgttataaaaaccgaacccgactgcgcgt

SEQ ID NO: 3806 - DNA, 25 bp, Artificial Sequence
  Description of Artificial Sequence: Synthetic primer
  Description of Combined DNA/RNA Molecule: Synthetic primer
tagtgaggtgcgattgagtcggata

SEQ ID NO: 3807 - DNA, 32 bp, Artificial Sequence
  Description of Artificial Sequence: Synthetic primer
  Description of Combined DNA/RNA Molecule: Synthetic primer
ggtgtcgtggctccgctcacccgaaaccccgc

SEQ ID NO: 3808 - DNA, 50 bp, Artificial Sequence
  Description of Artificial Sequence: Synthetic oligonucleotide
  Description of Combined DNA/RNA Molecule: Synthetic oligonucleotide
tcatcgccctcagatcttccagatgtgttgagttgttcgggatacgggat

SEQ ID NO: 3809 - DNA, 51 bp, Artificial Sequence
  Description of Artificial Sequence: Synthetic oligonucleotide
ggagcggttggagtagagaaaggtttttagtggaggatagattggagggca

SEQ ID NO: 3810 - DNA, 23 bp, Artificial Sequence
  Description of Artificial Sequence: Synthetic probe
aagggacacggagcggttggagt

SEQ ID NO: 3811 - DNA, 21 bp, Artificial Sequence
  Description of Artificial Sequence: Synthetic primer
tcatcgccctcagatcttcca

SEQ ID NO: 3812 - DNA, 21 bp, Artificial Sequence
  Description of Artificial Sequence: Synthetic primer
tgccctccaatctatcctcca

SEQ ID NO: 3813 - DNA, 44 bp, Artificial Sequence
  Description of Artificial Sequence: Synthetic primer
  Description of Combined DNA/RNA Molecule: Synthetic primer
tgccctccaatctatcctccacgctcacccgaaaccctgucctg

SEQ ID NO: 3814 - DNA, 22 bp, Artificial Sequence
  Description of Artificial Sequence: Synthetic primer
  Description of Combined DNA/RNA Molecule: Synthetic primer
gtgggtgaggataacgcgggaa

SEQ ID NO: 3815 - DNA, 40 bp, Artificial Sequence
  Description of Artificial Sequence: Synthetic primer
  Description of Combined DNA/RNA Molecule: Synthetic primer
ggtgtcgtggctacctatttccgaaactatcctaaactcg

SEQ ID NO: 3816 - DNA, 42 bp, Artificial Sequence
  Description of Artificial Sequence: Synthetic oligonucleotide
  Description of Combined DNA/RNA Molecule: Synthetic oligonucleotide
taaccagttaccaccgccacgggagggtagtgtgagcgggac

SEQ ID NO: 3817 - DNA, 54 bp, Artificial Sequence
  Description of Artificial Sequence: Synthetic oligonucleotide
ggagtcgcggtggatttgattttttgatttaggtggaggatagattggagggca

SEQ ID NO: 3818 - DNA, 20 bp, Artificial Sequence
  Description of Artificial Sequence: Synthetic probe
cctgtgagcggagtcgcggt

SEQ ID NO: 3819 - DNA, 19 bp, Artificial Sequence
  Description of Artificial Sequence: Synthetic primer
taaccagttaccaccgcca

SEQ ID NO: 3820 - DNA, 21 bp, Artificial Sequence
  Description of Artificial Sequence: Synthetic primer
tgccctccaatctatcctcca

SEQ ID NO: 3821 - DNA, 56 bp, Artificial Sequence
  Description of Artificial Sequence: Synthetic primer
  Description of Combined DNA/RNA Molecule: Synthetic primer
tgccctccaatctatcctccactatttccgaaactatcctaaactcacctgaacct

SEQ ID NO: 3822 - DNA, 20 bp, Artificial Sequence
  Description of Artificial Sequence: Synthetic primer
  Description of Combined DNA/RNA Molecule: Synthetic primer
ggtagcgggcggttcggaca

SEQ ID NO: 3823 - DNA, 32 bp, Artificial Sequence
  Description of Artificial Sequence: Synthetic primer
  Description of Combined DNA/RNA Molecule: Synthetic primer
ggtgtcgtgggtaccccacgtaaccgccccgt

SEQ ID NO: 3824 - DNA, 42 bp, Artificial Sequence
  Description of Artificial Sequence: Synthetic oligonucleotide
  Description of Combined DNA/RNA Molecule: Synthetic oligonucleotide
tcgcaccggaattctgacccgggcggttcggacgctcggaaa

SEQ ID NO: 3825 - DNA, 46 bp, Artificial Sequence
  Description of Artificial Sequence: Synthetic oligonucleotide
ggaggtcggcgaggtttttgagattcggtagtttcccatgacggca

SEQ ID NO: 3826 - DNA, 21 bp, Artificial Sequence
  Description of Artificial Sequence: Synthetic probe
ttgacgctcggaggtcggcgg

SEQ ID NO: 3827 - DNA, 19 bp, Artificial Sequence
  Description of Artificial Sequence: Synthetic primer
tcgcaccggaattctgacc

SEQ ID NO: 3828 - DNA, 20 bp, Artificial Sequence
  Description of Artificial Sequence: Synthetic primer
tgccgtcatgggaaactacc

SEQ ID NO: 3829 - DNA, 42 bp, Artificial Sequence
  Description of Artificial Sequence: Synthetic primer
  Description of Combined DNA/RNA Molecule: Synthetic primer
tgccgtcatgggaaactacccccacgtaaccgccctgcccct

SEQ ID NO: 3830 - DNA, 28 bp, Artificial Sequence
  Description of Artificial Sequence: Synthetic primer
  Description of Combined DNA/RNA Molecule: Synthetic primer
gtttgagaggagtgttcgttttcgtatc

SEQ ID NO: 3831 - DNA, 39 bp, Artificial Sequence
  Description of Artificial Sequence: Synthetic primer
  Description of Combined DNA/RNA Molecule: Synthetic primer
ggtgtcgtggatctaaaaaaaaccttacccgcgaacgat

SEQ ID NO: 3832 - DNA, 55 bp, Artificial Sequence
  Description of Artificial Sequence: Synthetic oligonucleotide
  Description of Combined DNA/RNA Molecule: Synthetic oligonucleotide
ttgcacgttgtcctgcaccgtttgagaggagtgttcgttttcgtattctcgatcc

SEQ ID NO: 3833 - DNA, 56 bp, Artificial Sequence
  Description of Artificial Sequence: Synthetic oligonucleotide
gattttattttttttcgtttttgtcgttgtagtcgtggtagtttcccatgacggca

SEQ ID NO: 3834 - DNA, 42 bp, Artificial Sequence
  Description of Artificial Sequence: Synthetic probe
tttattctcgattttattttttttcgtttttgtcgttgtagt

SEQ ID NO: 3835 - DNA, 19 bp, Artificial Sequence
  Description of Artificial Sequence: Synthetic primer
ttgcacgttgtcctgcacc

SEQ ID NO: 3836 - DNA, 20 bp, Artificial Sequence
  Description of Artificial Sequence: Synthetic primer
tgccgtcatgggaaactacc

SEQ ID NO: 3837 - DNA, 52 bp, Artificial Sequence
  Description of Artificial Sequence: Synthetic primer
  Description of Combined DNA/RNA Molecule: Synthetic primer
tgccgtcatgggaaactaccatctaaaaaaaaccttacccgcgaatgactat

SEQ ID NO: 3838 - DNA, 33 bp, Artificial Sequence
  Description of Artificial Sequence: Synthetic primer
  Description of Combined DNA/RNA Molecule: Synthetic primer
ggttttttattgagtcgtaatagagatcggttg

SEQ ID NO: 3839 - DNA, 38 bp, Artificial Sequence
  Description of Artificial Sequence: Synthetic primer
  Description of Combined DNA/RNA Molecule: Synthetic primer
ggtgtcgtggacttaaattccaaatcccgcaaacaacc

SEQ ID NO: 3840 - DNA, 53 bp, Artificial Sequence
  Description of Artificial Sequence: Synthetic oligonucleotide
  Description of Combined DNA/RNA Molecule: Synthetic oligonucleotide
tgcttacccacgatgcaccattgagtcgtaatagagatcggttagggcggacc

SEQ ID NO: 3841 - DNA, 50 bp, Artificial Sequence
  Description of Artificial Sequence: Synthetic oligonucleotide
ggattttggagttaggaaatcgaggattggggtcgtatgacttgctcgca

SEQ ID NO: 3842 - DNA, 31 bp, Artificial Sequence
  Description of Artificial Sequence: Synthetic probe
ttttagggcggattttgaggttaggaaatcg

SEQ ID NO: 3843 - DNA, 19 bp, Artificial Sequence
  Description of Artificial Sequence: Synthetic primer
tgcttacccacgatgcacc

SEQ ID NO: 3844 - DNA, 20 bp, Artificial Sequence
  Description of Artificial Sequence: Synthetic primer
tgcgagcaagtcatacgacc

SEQ ID NO: 3845 - DNA, 33 bp, Artificial Sequence
  Description of Artificial Sequence: Synthetic primer
  Description of Combined DNA/RNA Molecule: Synthetic primer
tttatcgagtttttttttttaggtagtcgaggc

SEQ ID NO: 3846 - DNA, 41 bp, Artificial Sequence
  Description of Artificial Sequence: Synthetic primer
  Description of Combined DNA/RNA Molecule: Synthetic primer
ggtgtcgtggcataactcaaaaccgaacaaaaaatcaaaag

SEQ ID NO: 3847 - DNA, 58 bp, Artificial Sequence
  Description of Artificial Sequence: Synthetic oligonucleotide
  Description of Combined DNA/RNA Molecule: Synthetic oligonucleotide
tagccgatggcgtaaaaccttaggtagtcgaggtttttttttatttttgtctcgcgcc

SEQ ID NO: 3848 - DNA, 56 bp, Artificial Sequence
  Description of Artificial Sequence: Synthetic oligonucleotide
gcgttttgggaggttttttgtttcgcgattataaagggtcgtatgacttgctcgca

SEQ ID NO: 3849 - DNA, 34 bp, Artificial Sequence
  Description of Artificial Sequence: Synthetic probe
ccttgtctcgcgttttgggaggttttttgtttcg

SEQ ID NO: 3850 - DNA, 19 bp, Artificial Sequence
  Description of Artificial Sequence: Synthetic primer
tagccgatggcgtaaaacc

SEQ ID NO: 3851 - DNA, 20 bp, Artificial Sequence
  Description of Artificial Sequence: Synthetic primer
tgcgagcaagtcatacgacc

SEQ ID NO: 3852 - DNA, 62 bp, Artificial Sequence
  Description of Artificial Sequence: Synthetic primer
  Description of Combined DNA/RNA Molecule: Synthetic primer
tgcgagcaagtcatacgacccaaaaccgaacaaaaaatcaaaaaaactttataattgcgaag

SEQ ID NO: 3853 - DNA, 33 bp, Artificial Sequence
  Description of Artificial Sequence: Synthetic primer
  Description of Combined DNA/RNA Molecule: Synthetic primer
tttattggtttgttttgcgttttttttcgtttc

SEQ ID NO: 3854 - DNA, 39 bp, Artificial Sequence
  Description of Artificial Sequence: Synthetic primer
  Description of Combined DNA/RNA Molecule: Synthetic primer
ggtgtcgtggacgctcccaaaaaaaaaaaaaaccuaaat

SEQ ID NO: 3855 - DNA, 55 bp, Artificial Sequence
  Description of Artificial Sequence: Synthetic oligonucleotide
  Description of Combined DNA/RNA Molecule: Synthetic oligonucleotide
ttacaggccgcatagcaacgtttgttttgcgttttttttcgttttttagcgcgaa

SEQ ID NO: 3856 - DNA, 54 bp, Artificial Sequence
  Description of Artificial Sequence: Synthetic oligonucleotide
gcgggtattggatgttagtcgttttgttttaggaggttgagacatgggctcgca

SEQ ID NO: 3857 - DNA, 32 bp, Artificial Sequence
  Description of Artificial Sequence: Synthetic probe
aattttagcgcgggtattggatgttagtcgtt

SEQ ID NO: 3858 - DNA, 19 bp, Artificial Sequence
  Description of Artificial Sequence: Synthetic primer
ttacaggccgcatagcaac

SEQ ID NO: 3859 - DNA, 19 bp, Artificial Sequence
  Description of Artificial Sequence: Synthetic primer
tgcgagcccatgtctcaac

SEQ ID NO: 3860 - DNA, 23 bp, Artificial Sequence
  Description of Artificial Sequence: Synthetic primer
  Description of Combined DNA/RNA Molecule: Synthetic primer
ggatttattgacgcgggcgtatg

SEQ ID NO: 3861 - DNA, 43 bp, Artificial Sequence
  Description of Artificial Sequence: Synthetic primer
  Description of Combined DNA/RNA Molecule: Synthetic primer
ggtgtcgtggatttcgataatttcttcaaaaaaaaataccact

SEQ ID NO: 3862 - DNA, 50 bp, Artificial Sequence
  Description of Artificial Sequence: Synthetic oligonucleotide
  Description of Combined DNA/RNA Molecule: Synthetic oligonucleotide
ttcgcctaccgcagtgaaccgcgggcgtatagagattaggtgctcgggcc

SEQ ID NO: 3863 - DNA, 66 bp, Artificial Sequence
  Description of Artificial Sequence: Synthetic oligonucleotide
gggttttacggttttttattttttgtttttattaaaattgtaggtgggttgagacatgggctcgca

SEQ ID NO: 3864 - DNA, 49 bp, Artificial Sequence
  Description of Artificial Sequence: Synthetic probe
ccggtgctcgggttttacggttttttattttttgtttttattaaaattg

SEQ ID NO: 3865 - DNA, 19 bp, Artificial Sequence
  Description of Artificial Sequence: Synthetic primer
ttcgcctaccgcagtgaac

SEQ ID NO: 3866 - DNA, 19 bp, Artificial Sequence
  Description of Artificial Sequence: Synthetic primer
tgcgagcccatgtctcaac

SEQ ID NO: 3867 - DNA, 38 bp, Artificial Sequence
  Description of Artificial Sequence: Synthetic primer
  Description of Combined DNA/RNA Molecule: Synthetic primer
tttttaaatgttagaaaattgtgttatttattcgttac

SEQ ID NO: 3868 - DNA, 31 bp, Artificial Sequence
  Description of Artificial Sequence: Synthetic primer
  Description of Combined DNA/RNA Molecule: Synthetic primer
ggtgtcgtggcgccccctcctcctacuacct

SEQ ID NO: 3869 - DNA, 68 bp, Artificial Sequence
  Description of Artificial Sequence: Synthetic oligonucleotide
  Description of Combined DNA/RNA Molecule: Synthetic oligonucleotide
ttcgcctaccgcagtgaacgaaaattgtgttatttattcgttatgttgagtattgttatactcggaag

SEQ ID NO: 3870 - DNA, 53 bp, Artificial Sequence
  Description of Artificial Sequence: Synthetic oligonucleotide
ggagatttcggagattttcgggtaggttttaatggttgagacatgggctcgca

SEQ ID NO: 3871 - DNA, 35 bp, Artificial Sequence
  Description of Artificial Sequence: Synthetic probe
aatatactcggagatttcggagattttcgggtagg

SEQ ID NO: 3872 - DNA, 19 bp, Artificial Sequence
  Description of Artificial Sequence: Synthetic primer
ttcgcctaccgcagtgaac

SEQ ID NO: 3873 - DNA, 19 bp, Artificial Sequence
  Description of Artificial Sequence: Synthetic primer
tgcgagcccatgtctcaac

SEQ ID NO: 3874 - DNA, 44 bp, Artificial Sequence
  Description of Artificial Sequence: Synthetic primer
  Description of Combined DNA/RNA Molecule: Synthetic primer
tgcgagcccatgtctcaacccctcctcctactacccgtgaccct

SEQ ID NO: 3875 - DNA, 25 bp, Artificial Sequence
  Description of Artificial Sequence: Synthetic primer
  Description of Combined DNA/RNA Molecule: Synthetic primer
gttttcgggcgtttcgtttcgtttc

SEQ ID NO: 3876 - DNA, 30 bp, Artificial Sequence
  Description of Artificial Sequence: Synthetic primer
  Description of Combined DNA/RNA Molecule: Synthetic primer
ggtgtcgtggccccgacgaccgaccuccgg

SEQ ID NO: 3877 - DNA, 61 bp, Artificial Sequence
  Description of Artificial Sequence: Synthetic oligonucleotide
  Description of Combined DNA/RNA Molecule: Synthetic oligonucleotide
ttgcatttcgttagcgacacatgtttttttattttgattttcgggtttttgttctcgatcc

SEQ ID NO: 3878 - DNA, 61 bp, Artificial Sequence
  Description of Artificial Sequence: Synthetic oligonucleotide
gattttagttttttaggaggcggttttagtttagttagggatgtgagtcgatctacccgca

SEQ ID NO: 3879 - DNA, 40 bp, Artificial Sequence
  Description of Artificial Sequence: Synthetic probe
aatgttctcgattttagttttttaggaggcggttttagtt

SEQ ID NO: 3880 - DNA, 21 bp, Artificial Sequence
  Description of Artificial Sequence: Synthetic primer
ttgcatttcgttagcgacaca

SEQ ID NO: 3881 - DNA, 20 bp, Artificial Sequence
  Description of Artificial Sequence: Synthetic primer
tgcgggtagatcgactcaca

SEQ ID NO: 3882 - DNA, 42 bp, Artificial Sequence
  Description of Artificial Sequence: Synthetic primer
  Description of Combined DNA/RNA Molecule: Synthetic primer
tgcgggtagatcgactcacaccgacgaccgacctctgaaaag

SEQ ID NO: 3883 - DNA, 33 bp, Artificial Sequence
  Description of Artificial Sequence: Synthetic primer
  Description of Combined DNA/RNA Molecule: Synthetic primer
aattatagatcgattaggtaaaggtaaagggac

SEQ ID NO: 3884 - DNA, 41 bp, Artificial Sequence
  Description of Artificial Sequence: Synthetic primer
  Description of Combined DNA/RNA Molecule: Synthetic primer
ggtgtcgtggaaaatacctcactaaatcataaacgauaaag

SEQ ID NO: 3885 - DNA, 71 bp, Artificial Sequence
  Description of Artificial Sequence: Synthetic oligonucleotide
  Description of Combined DNA/RNA Molecule: Synthetic oligonucleotide
ttgcatttcgttagcgacacaatgaatttttattttattaatttttttttattttgttatttcatcgggaa

SEQ ID NO: 3886 - DNA, 60 bp, Artificial Sequence
  Description of Artificial Sequence: Synthetic oligonucleotide
gggagttaggacgttttttttaacgtcgtttttaattttatgtgagtcgatctacccgca

SEQ ID NO: 3887 - DNA, 34 bp, Artificial Sequence
  Description of Artificial Sequence: Synthetic probe
cctttcatcgggagttaggacgttttttttaacg

SEQ ID NO: 3888 - DNA, 21 bp, Artificial Sequence
  Description of Artificial Sequence: Synthetic primer
ttgcatttcgttagcgacaca

SEQ ID NO: 3889 - DNA, 20 bp, Artificial Sequence
  Description of Artificial Sequence: Synthetic primer
tgcgggtagatcgactcaca

SEQ ID NO: 3890 - DNA, 65 bp, Artificial Sequence
  Description of Artificial Sequence: Synthetic primer
  Description of Combined DNA/RNA Molecule: Synthetic primer
tgcgggtagatcgactcacaaaaatacctcactaaatcataaacgataaaattaaaaatgacgtc

SEQ ID NO: 3891 - DNA, 27 bp, Artificial Sequence
  Description of Artificial Sequence: Synthetic primer
  Description of Combined DNA/RNA Molecule: Synthetic primer
gcgtttttaattttgaggaggcgttaa

SEQ ID NO: 3892 - DNA, 39 bp, Artificial Sequence
  Description of Artificial Sequence: Synthetic primer
  Description of Combined DNA/RNA Molecule: Synthetic primer
ggtgtcgtggctaattcccactccaatccttcgaaaatg

SEQ ID NO: 3893 - DNA, 61 bp, Artificial Sequence
  Description of Artificial Sequence: Synthetic oligonucleotide
  Description of Combined DNA/RNA Molecule: Synthetic oligonucleotide
taccactcatcttctgcgacacgtttttaattttgaggaggcgttagttttttgtcggaag

SEQ ID NO: 3894 - DNA, 66 bp, Artificial Sequence
  Description of Artificial Sequence: Synthetic oligonucleotide
ggagatttaaatataataaattaagtcgtttgttttggcgatattttgtgagtcgatctacccgca

SEQ ID NO: 3895 - DNA, 47 bp, Artificial Sequence
  Description of Artificial Sequence: Synthetic probe
aattttgtcggagatttaaatataataaattaagtcgtttgttttgg

SEQ ID NO: 3896 - DNA, 21 bp, Artificial Sequence
  Description of Artificial Sequence: Synthetic primer
taccactcatcttctgcgaca

SEQ ID NO: 3897 - DNA, 20 bp, Artificial Sequence
  Description of Artificial Sequence: Synthetic primer
tgcgggtagatcgactcaca

SEQ ID NO: 3898 - DNA, 57 bp, Artificial Sequence
  Description of Artificial Sequence: Synthetic primer
  Description of Combined DNA/RNA Molecule: Synthetic primer
tgcgggtagatcgactcacactaattcccactccaatccttcgaaaatattgccaag

SEQ ID NO: 3899 - DNA, 20 bp, Artificial Sequence
  Description of Artificial Sequence: Synthetic primer
  Description of Combined DNA/RNA Molecule: Synthetic primer
ggagtcgaggtcggcgtgga

SEQ ID NO: 3900 - DNA, 31 bp, Artificial Sequence
  Description of Artificial Sequence: Synthetic primer
  Description of Combined DNA/RNA Molecule: Synthetic primer
ggtgtcgtggcccctcgtcgcgtatcccgag

SEQ ID NO: 3901 - DNA, 42 bp, Artificial Sequence
  Description of Artificial Sequence: Synthetic oligonucleotide
  Description of Combined DNA/RNA Molecule: Synthetic oligonucleotide
tctcatgggcgctagtatcaacgcgtgaggtgggagcgttga

SEQ ID NO: 3902 - DNA, 39 bp, Artificial Sequence
  Description of Artificial Sequence: Synthetic oligonucleotide
gttagggaggcgggcgggtttccctgattgatacccgca

SEQ ID NO: 3903 - DNA, 21 bp, Artificial Sequence
  Description of Artificial Sequence: Synthetic probe
tttgggagcgttagggaggcg

SEQ ID NO: 3904 - DNA, 22 bp, Artificial Sequence
  Description of Artificial Sequence: Synthetic primer
tctcatgggcgctagtatcaac

SEQ ID NO: 3905 - DNA, 22 bp, Artificial Sequence
  Description of Artificial Sequence: Synthetic primer
tgcgggtatcaatcagggaaac

SEQ ID NO: 3906 - DNA, 45 bp, Artificial Sequence
  Description of Artificial Sequence: Synthetic primer
  Description of Combined DNA/RNA Molecule: Synthetic primer
tgcgggtatcaatcagggaaacccctcgtcgcgtatcctgaactt

SEQ ID NO: 3907 - DNA, 28 bp, Artificial Sequence
  Description of Artificial Sequence: Synthetic primer
  Description of Combined DNA/RNA Molecule: Synthetic primer
ggttagttttattggcgttaggcgggta

SEQ ID NO: 3908 - DNA, 41 bp, Artificial Sequence
  Description of Artificial Sequence: Synthetic primer
  Description of Combined DNA/RNA Molecule: Synthetic primer
ggtgtcgtggatatattcttcctaaaaccgatacgaaatcg

SEQ ID NO: 3909 - DNA, 42 bp, Artificial Sequence
  Description of Artificial Sequence: Synthetic oligonucleotide
  Description of Combined DNA/RNA Molecule: Synthetic oligonucleotide
tggatcgagacggaatgcaacgcgggtgagggaacgcgttag

SEQ ID NO: 3910 - DNA, 70 bp, Artificial Sequence
  Description of Artificial Sequence: Synthetic oligonucleotide
gttgagaggattcgtttagtttgtttaaaagttattagttttttgattgtttccctgattgatacccgca

SEQ ID NO: 3911 - DNA, 40 bp, Artificial Sequence
  Description of Artificial Sequence: Synthetic probe
ttggaacgcgttgagaggattcgtttagtttgtttaaaag

SEQ ID NO: 3912 - DNA, 21 bp, Artificial Sequence
  Description of Artificial Sequence: Synthetic primer
tggatcgagacggaatgcaac

SEQ ID NO: 3913 - DNA, 22 bp, Artificial Sequence
  Description of Artificial Sequence: Synthetic primer
tgcgggtatcaatcagggaaac

SEQ ID NO: 3914 - DNA, 28 bp, Artificial Sequence
  Description of Artificial Sequence: Synthetic primer
  Description of Combined DNA/RNA Molecule: Synthetic primer
ggtacgttcgttaggagtaggtagggta

SEQ ID NO: 3915 - DNA, 35 bp, Artificial Sequence; identical to SEQ ID NO: 482
  Description of Artificial Sequence: Synthetic primer
  Description of Combined DNA/RNA Molecule: Synthetic primer

SEQ ID NO: 3916 - DNA, 50 bp, Artificial Sequence; identical to SEQ ID NO: 483
  Description of Artificial Sequence: Synthetic oligonucleotide
  Description of Combined DNA/RNA Molecule: Synthetic oligonucleotide

SEQ ID NO: 3917 - DNA, 40 bp, Artificial Sequence; identical to SEQ ID NO: 484
  Description of Artificial Sequence: Synthetic oligonucleotide

SEQ ID NO: 3918 - DNA, 19 bp, Artificial Sequence
  Description of Artificial Sequence: Synthetic probe
cattcgggcggtcgtcggc

SEQ ID NO: 3919 - DNA, 22 bp, Artificial Sequence
  Description of Artificial Sequence: Synthetic primer
tgccctatcgaaaaggacaaca

SEQ ID NO: 3920 - DNA, 21 bp, Artificial Sequence
  Description of Artificial Sequence: Synthetic primer
tgtcatagacagccgcaaaca

SEQ ID NO: 3921 - DNA, 51 bp, Artificial Sequence; identical to SEQ ID NO: 488
  Description of Artificial Sequence: Synthetic primer
  Description of Combined DNA/RNA Molecule: Synthetic primer

SEQ ID NO: 3922 - DNA, 26 bp, Artificial Sequence
  Description of Artificial Sequence: Synthetic primer
  Description of Combined DNA/RNA Molecule: Synthetic primer
tttcgtaggttgttagaggtcgggtc

SEQ ID NO: 3923 - DNA, 33 bp, Artificial Sequence
  Description of Artificial Sequence: Synthetic primer
  Description of Combined DNA/RNA Molecule: Synthetic primer
ggtgtcgtggcgtcgaaccccaaatcgcaaccg

SEQ ID NO: 3924 - DNA, 46 bp, Artificial Sequence
  Description of Artificial Sequence: Synthetic oligonucleotide
  Description of Combined DNA/RNA Molecule: Synthetic oligonucleotide
tcctgagggacaaatacacaccgggttagggttcggtgagcgggac

SEQ ID NO: 3925 - DNA, 47 bp, Artificial Sequence
  Description of Artificial Sequence: Synthetic oligonucleotide
ggagttgatcgcgggaattgggttagggtaggtaaggaagtcacgca

SEQ ID NO: 3926 - DNA, 22 bp, Artificial Sequence
  Description of Artificial Sequence: Synthetic probe
aaggtgagcggagttgatcgcg

SEQ ID NO: 3927 - DNA, 22 bp, Artificial Sequence
  Description of Artificial Sequence: Synthetic primer
tcctgagggacaaatacacacc

SEQ ID NO: 3928 - DNA, 21 bp, Artificial Sequence
  Description of Artificial Sequence: Synthetic primer
tgcgtgacttccttacctacc

SEQ ID NO: 3929 - DNA, 20 bp, Artificial Sequence
  Description of Artificial Sequence: Synthetic primer
  Description of Combined DNA/RNA Molecule: Synthetic primer
cggcggtcgtcgttcgcgac

SEQ ID NO: 3930 - DNA, 35 bp, Artificial Sequence
  Description of Artificial Sequence: Synthetic primer
  Description of Combined DNA/RNA Molecule: Synthetic primer
ggtgtcgtggcccgaaaaatcaaaacccgaaatag

SEQ ID NO: 3931 - DNA, 45 bp, Artificial Sequence
  Description of Artificial Sequence: Synthetic oligonucleotide
  Description of Combined DNA/RNA Molecule: Synthetic oligonucleotide
ttgcaacaggctaccgacccggtcgtcgttcgcgattctcgcgga

SEQ ID NO: 3932 - DNA, 52 bp, Artificial Sequence
  Description of Artificial Sequence: Synthetic oligonucleotide
gcgagtcgtttttcgaggtttcgtttttcgtggtaggtaaggaagtcacgca

SEQ ID NO: 3933 - DNA, 32 bp, Artificial Sequence
  Description of Artificial Sequence: Synthetic probe
ttgattctcgcgagtcgtttttcgaggtttcg

SEQ ID NO: 3934 - DNA, 19 bp, Artificial Sequence
  Description of Artificial Sequence: Synthetic primer
ttgcaacaggctaccgacc

SEQ ID NO: 3935 - DNA, 21 bp, Artificial Sequence
  Description of Artificial Sequence: Synthetic primer
tgcgtgacttccttacctacc

SEQ ID NO: 3936 - DNA, 57 bp, Artificial Sequence
  Description of Artificial Sequence: Synthetic primer
  Description of Combined DNA/RNA Molecule: Synthetic primer
tgcgtgacttccttacctaccccgaaaaatcaaaacccgaaataataaaatgaaaag

SEQ ID NO: 3937 - DNA, 35 bp, Artificial Sequence
  Description of Artificial Sequence: Synthetic primer
  Description of Combined DNA/RNA Molecule: Synthetic primer
gtttttttttttttttttttagtttgcgacgggtc

SEQ ID NO: 3938 - DNA, 30 bp, Artificial Sequence
  Description of Artificial Sequence: Synthetic primer
  Description of Combined DNA/RNA Molecule: Synthetic primer
ggtgtcgtggaccgaaaccgcgcgacgctg

SEQ ID NO: 3939 - DNA, 58 bp, Artificial Sequence
  Description of Artificial Sequence: Synthetic oligonucleotide
  Description of Combined DNA/RNA Molecule: Synthetic oligonucleotide
taagcctgcttttccgaaacaacgacgggtttttttttttggatatttacaacgcgag

SEQ ID NO: 3940 - DNA, 63 bp, Artificial Sequence
  Description of Artificial Sequence: Synthetic oligonucleotide
gcggatttagtttttatttttattgagtgtcgggtttttaggttgtattgcgccaggatagca

SEQ ID NO: 3941 - DNA, 42 bp, Artificial Sequence
  Description of Artificial Sequence: Synthetic probe
ccttacaacgcggatttagtttttatttttattgagtgtcgg

SEQ ID NO: 3942 - DNA, 22 bp, Artificial Sequence
  Description of Artificial Sequence: Synthetic primer
taagcctgcttttccgaaacaa

SEQ ID NO: 3943 - DNA, 21 bp, Artificial Sequence
  Description of Artificial Sequence: Synthetic primer
tgctatcctggcgcaatacaa

SEQ ID NO: 3944 - DNA, 42 bp, Artificial Sequence
  Description of Artificial Sequence: Synthetic primer
  Description of Combined DNA/RNA Molecule: Synthetic primer
tgctatcctggcgcaatacaaccgaaaccgcgcgatgctaac

SEQ ID NO: 3945 - DNA, 30 bp, Artificial Sequence
  Description of Artificial Sequence: Synthetic primer
  Description of Combined DNA/RNA Molecule: Synthetic primer
gttttggttgtttttttaatttcgcgggac

SEQ ID NO: 3946 - DNA, 34 bp, Artificial Sequence
  Description of Artificial Sequence: Synthetic primer
  Description of Combined DNA/RNA Molecule: Synthetic primer
ggtgtcgtggcccctcgaatcacgtactaaccct

SEQ ID NO: 3947 - DNA, 53 bp, Artificial Sequence
  Description of Artificial Sequence: Synthetic oligonucleotide
  Description of Combined DNA/RNA Molecule: Synthetic oligonucleotide
ttggcaactctccacccaattagttggtatgttttaaggacgttttgcgttca

SEQ ID NO: 3948 - DNA, 57 bp, Artificial Sequence
  Description of Artificial Sequence: Synthetic oligonucleotide
gtttgtttttttggttttcggttcgtaagtagcgggttgtattgcgccaggatagca

SEQ ID NO: 3949 - DNA, 41 bp, Artificial Sequence
  Description of Artificial Sequence: Synthetic probe
ttgttttgcgtttgtttttttggttttcggttcgtaagtag

SEQ ID NO: 3950 - DNA, 19 bp, Artificial Sequence
  Description of Artificial Sequence: Synthetic primer
ttggcaactctccacccaa

SEQ ID NO: 3951 - DNA, 21 bp, Artificial Sequence
  Description of Artificial Sequence: Synthetic primer
tgctatcctggcgcaatacaa

SEQ ID NO: 3952 - DNA, 49 bp, Artificial Sequence
  Description of Artificial Sequence: Synthetic primer
  Description of Combined DNA/RNA Molecule: Synthetic primer
tgctatcctggcgcaatacaacctcgaatcacgtactaaccctgctacc

SEQ ID NO: 3953 - DNA, 26 bp, Artificial Sequence
  Description of Artificial Sequence: Synthetic primer
  Description of Combined DNA/RNA Molecule: Synthetic primer
tatttcgaggttgcgggattcgttaa

SEQ ID NO: 3954 - DNA, 37 bp, Artificial Sequence
  Description of Artificial Sequence: Synthetic primer
  Description of Combined DNA/RNA Molecule: Synthetic primer
ggtgtcgtggaccaacccgcgaaaattttaacctaag

SEQ ID NO: 3955 - DNA, 53 bp, Artificial Sequence
  Description of Artificial Sequence: Synthetic oligonucleotide
  Description of Combined DNA/RNA Molecule: Synthetic oligonucleotide
tcgacgaatctgctcagacaacgaggttgcgggattcgttagattctcgatct

SEQ ID NO: 3956 - DNA, 55 bp, Artificial Sequence
  Description of Artificial Sequence: Synthetic oligonucleotide
gattcgggagaggtttaggcgtttttattaggttttttgaagcagcgtctgagca

SEQ ID NO: 3957 - DNA, 37 bp, Artificial Sequence
  Description of Artificial Sequence: Synthetic probe
ccgattctcgattcgggagaggtttaggcgtttttat

SEQ ID NO: 3958 - DNA, 21 bp, Artificial Sequence
  Description of Artificial Sequence: Synthetic primer
tcgacgaatctgctcagacaa

SEQ ID NO: 3959 - DNA, 19 bp, Artificial Sequence
  Description of Artificial Sequence: Synthetic primer
tgctcagacgctgcttcaa

SEQ ID NO: 3960 - DNA, 52 bp, Artificial Sequence
  Description of Artificial Sequence: Synthetic primer
  Description of Combined DNA/RNA Molecule: Synthetic primer
tgctcagacgctgcttcaaccaacccgcgaaaattttaacctaaatgaaaag

SEQ ID NO: 3961 - DNA, 29 bp, Artificial Sequence
  Description of Artificial Sequence: Synthetic primer
  Description of Combined DNA/RNA Molecule: Synthetic primer
cgaaggttttagtcggagtatttcgggag

SEQ ID NO: 3962 - DNA, 33 bp, Artificial Sequence
  Description of Artificial Sequence: Synthetic primer
  Description of Combined DNA/RNA Molecule: Synthetic primer
ggtgtcgtggcctccccttcccgaatcautcct

SEQ ID NO: 3963 - DNA, 55 bp, Artificial Sequence
  Description of Artificial Sequence: Synthetic oligonucleotide
  Description of Combined DNA/RNA Molecule: Synthetic oligonucleotide
tcgacgaatctgctcagacaatcggagtatttcgggaatttgggattctcggtcc

SEQ ID NO: 3964 - DNA, 63 bp, Artificial Sequence
  Description of Artificial Sequence: Synthetic oligonucleotide
ggtttttattcgttttgtttttatttcgttatttttttgtcgggttgaagcagcgtctgagca

SEQ ID NO: 3965 - DNA, 48 bp, Artificial Sequence
  Description of Artificial Sequence: Synthetic probe
ttgattctcggtttttattcgttttgtttttatttcgttatttttttg

SEQ ID NO: 3966 - DNA, 21 bp, Artificial Sequence
  Description of Artificial Sequence: Synthetic primer
tcgacgaatctgctcagacaa

SEQ ID NO: 3967 - DNA, 19 bp, Artificial Sequence
  Description of Artificial Sequence: Synthetic primer
tgctcagacgctgcttcaa

SEQ ID NO: 3968 - DNA, 45 bp, Artificial Sequence
  Description of Artificial Sequence: Synthetic primer
  Description of Combined DNA/RNA Molecule: Synthetic primer
tgctcagacgctgcttcaaccccttcccgaatcattcctgacaag

SEQ ID NO: 3969 - DNA, 25 bp, Artificial Sequence
  Description of Artificial Sequence: Synthetic primer
  Description of Combined DNA/RNA Molecule: Synthetic primer
ggattcggttttgttgttgcgttca

SEQ ID NO: 3970 - DNA, 33 bp, Artificial Sequence
  Description of Artificial Sequence: Synthetic primer
  Description of Combined DNA/RNA Molecule: Synthetic primer
ggtgtcgtggacgtaaaaaacgcccgaccctat

SEQ ID NO: 3971 - DNA, 46 bp, Artificial Sequence
  Description of Artificial Sequence: Synthetic oligonucleotide
  Description of Combined DNA/RNA Molecule: Synthetic oligonucleotide
tttccgccgctacaaccaagttttgttgttgcgttcgttgcggacc

SEQ ID NO: 3972 - DNA, 63 bp, Artificial Sequence
  Description of Artificial Sequence: Synthetic oligonucleotide
ggattttcgttagggtttttgtaggtatcgtttttatatcgtagttgaagcagcgtctgagca

SEQ ID NO: 3973 - DNA, 34 bp, Artificial Sequence
  Description of Artificial Sequence: Synthetic probe
aatcgttgcggattttcgttagggtttttgtagg

SEQ ID NO: 3974 - DNA, 19 bp, Artificial Sequence
  Description of Artificial Sequence: Synthetic primer
tttccgccgctacaaccaa

SEQ ID NO: 3975 - DNA, 19 bp, Artificial Sequence
  Description of Artificial Sequence: Synthetic primer
tgctcagacgctgcttcaa

SEQ ID NO: 3976 - DNA, 49 bp, Artificial Sequence
  Description of Artificial Sequence: Synthetic primer
  Description of Combined DNA/RNA Molecule: Synthetic primer
tgctcagacgctgcttcaacgcccgaccctacgatataaaaatgatact

SEQ ID NO: 3977 - DNA, 28 bp, Artificial Sequence
  Description of Artificial Sequence: Synthetic primer
  Description of Combined DNA/RNA Molecule: Synthetic primer
ttagttcgtagtaattgcgtagcgggaa

SEQ ID NO: 3978 - DNA, 30 bp, Artificial Sequence
  Description of Artificial Sequence: Synthetic primer
  Description of Combined DNA/RNA Molecule: Synthetic primer
ggtgtcgtgggcgtcctcctcgcaacctcc

SEQ ID NO: 3979 - DNA, 51 bp, Artificial Sequence
  Description of Artificial Sequence: Synthetic oligonucleotide
  Description of Combined DNA/RNA Molecule: Synthetic oligonucleotide
tcagtgaaaacacatccacccagtagcggagggaatttagggtctcgcgac

SEQ ID NO: 3980 - DNA, 59 bp, Artificial Sequence
  Description of Artificial Sequence: Synthetic oligonucleotide
gcggtattcgtaggttttagttattgtttcgaggttttcgtggtgagcagggatgagca

SEQ ID NO: 3981 - DNA, 38 bp, Artificial Sequence
  Description of Artificial Sequence: Synthetic probe
ccgggtctcgcggtattcgtaggttttagttattgttt

SEQ ID NO: 3982 - DNA, 22 bp, Artificial Sequence
  Description of Artificial Sequence: Synthetic primer
tcagtgaaaacacatccaccca

SEQ ID NO: 3983 - DNA, 19 bp, Artificial Sequence
  Description of Artificial Sequence: Synthetic primer
tgctcatccctgctcacca

SEQ ID NO: 3984 - DNA, 51 bp, Artificial Sequence
  Description of Artificial Sequence: Synthetic primer
  Description of Combined DNA/RNA Molecule: Synthetic primer
tgctcatccctgctcaccacaacctctctttaatccgaaaaccttgaaacg

SEQ ID NO: 3985 - DNA, 37 bp, Artificial Sequence
  Description of Artificial Sequence: Synthetic primer
  Description of Combined DNA/RNA Molecule: Synthetic primer
tttattatttttcgtttatttttgtttttttcgggta

SEQ ID NO: 3986 - DNA, 38 bp, Artificial Sequence
  Description of Artificial Sequence: Synthetic primer
  Description of Combined DNA/RNA Molecule: Synthetic primer
ggtgtcgtggaaactcatccaaaaacgccttaaaaacc

SEQ ID NO: 3987 - DNA, 56 bp, Artificial Sequence
  Description of Artificial Sequence: Synthetic oligonucleotide
  Description of Combined DNA/RNA Molecule: Synthetic oligonucleotide
tcgtagactcgctatcgccacgtttatttttgtttttttcgggtgggacacgtgga

SEQ ID NO: 3988 - DNA, 54 bp, Artificial Sequence
  Description of Artificial Sequence: Synthetic oligonucleotide
gtgagttgttttgttgttcggatggaggttttaggtggtgagcagggatgagca

SEQ ID NO: 3989 - DNA, 33 bp, Artificial Sequence
  Description of Artificial Sequence: Synthetic probe
aagggacacgtgagttgttttgttgttcggatg

SEQ ID NO: 3990 - DNA, 20 bp, Artificial Sequence
  Description of Artificial Sequence: Synthetic primer
tcgtagactcgctatcgcca

SEQ ID NO: 3991 - DNA, 19 bp, Artificial Sequence
  Description of Artificial Sequence: Synthetic primer
tgctcatccctgctcacca

SEQ ID NO: 3992 - DNA, 52 bp, Artificial Sequence
  Description of Artificial Sequence: Synthetic primer
  Description of Combined DNA/RNA Molecule: Synthetic primer
tgctcatccctgctcaccactcatccaaaaacgccttaaaaactatgaaact

SEQ ID NO: 3993 - DNA, 23 bp, Artificial Sequence
  Description of Artificial Sequence: Synthetic primer
  Description of Combined DNA/RNA Molecule: Synthetic primer
cgggtcgatagtgacgtcgtgaa

SEQ ID NO: 3994 - DNA, 34 bp, Artificial Sequence
  Description of Artificial Sequence: Synthetic primer
  Description of Combined DNA/RNA Molecule: Synthetic primer
ggtgtcgtggcctaaaccttaacgcccaauatcc

SEQ ID NO: 3995 - DNA, 49 bp, Artificial Sequence
  Description of Artificial Sequence: Synthetic oligonucleotide
  Description of Combined DNA/RNA Molecule: Synthetic oligonucleotide
ttgcacccgcgacataaccgtcgtgagtttgaggatgaagatgcgggta

SEQ ID NO: 3996 - DNA, 42 bp, Artificial Sequence
  Description of Artificial Sequence: Synthetic oligonucleotide
gggcgcggtgggtggagtagggtaattcactcgaacggagca

SEQ ID NO: 3997 - DNA, 20 bp, Artificial Sequence
  Description of Artificial Sequence: Synthetic probe
aaaagatgcgggcgcggtgg

SEQ ID NO: 3998 - DNA, 19 bp, Artificial Sequence
  Description of Artificial Sequence: Synthetic primer
ttgcacccgcgacataacc

SEQ ID NO: 3999 - DNA, 22 bp, Artificial Sequence
  Description of Artificial Sequence: Synthetic primer
tgctccgttcgagtgaattacc

SEQ ID NO: 4000 - DNA, 57 bp, Artificial Sequence
  Description of Artificial Sequence: Synthetic primer
  Description of Combined DNA/RNA Molecule: Synthetic primer
tgctccgttcgagtgaattacccgcccaatatctataaatcccaatactctgaccct

SEQ ID NO: 4001 - DNA, 32 bp, Artificial Sequence
  Description of Artificial Sequence: Synthetic primer
  Description of Combined DNA/RNA Molecule: Synthetic primer
cgaggtttttttttatttttgtttcgcgtttc

SEQ ID NO: 4002 - DNA, 30 bp, Artificial Sequence
  Description of Artificial Sequence: Synthetic primer
  Description of Combined DNA/RNA Molecule: Synthetic primer
ggtgtcgtggaaaaccgcgacccgcccact

SEQ ID NO: 4003 - DNA, 49 bp, Artificial Sequence
  Description of Artificial Sequence: Synthetic oligonucleotide
  Description of Combined DNA/RNA Molecule: Synthetic oligonucleotide
tccggcctttgacgatacccgttttgggaggttttttgttttgcgatcg

SEQ ID NO: 4004 - DNA, 72 bp, Artificial Sequence
  Description of Artificial Sequence: Synthetic oligonucleotide
gattataaagtttttttgattttttgttcggttttgagttatgtgattcgggtaattcactcgaacggagca

SEQ ID NO: 4005 - DNA, 47 bp, Artificial Sequence
  Description of Artificial Sequence: Synthetic probe
aagttttgcgattataaagtttttttgattttttgttcggttttgag

SEQ ID NO: 4006 - DNA, 19 bp, Artificial Sequence
  Description of Artificial Sequence: Synthetic primer
tccggcctttgacgatacc

SEQ ID NO: 4007 - DNA, 22 bp, Artificial Sequence
  Description of Artificial Sequence: Synthetic primer
tgctccgttcgagtgaattacc

SEQ ID NO: 4008 - DNA, 42 bp, Artificial Sequence
  Description of Artificial Sequence: Synthetic primer
  Description of Combined DNA/RNA Molecule: Synthetic primer
tgctccgttcgagtgaattaccgcgacccgcccactgaatcg

SEQ ID NO: 4009 - DNA, 24 bp, Artificial Sequence
  Description of Artificial Sequence: Synthetic primer
  Description of Combined DNA/RNA Molecule: Synthetic primer
ttttttttgggagcgttgcggatc

SEQ ID NO: 4010 - DNA, 34 bp, Artificial Sequence
  Description of Artificial Sequence: Synthetic primer
  Description of Combined DNA/RNA Molecule: Synthetic primer
ggtgtcgtgggcacgactaaaaccccaaaaacca

SEQ ID NO: 4011 - DNA, 48 bp, Artificial Sequence
  Description of Artificial Sequence: Synthetic oligonucleotide
  Description of Combined DNA/RNA Molecule: Synthetic oligonucleotide
tccggcctttgacgataccttttgggagcgttgcggattactcgtaaa

SEQ ID NO: 4012 - DNA, 53 bp, Artificial Sequence
  Description of Artificial Sequence: Synthetic oligonucleotide
gtaggcggttcggtattttcgtataggtgggggtaattcactcgaacggagca

SEQ ID NO: 4013 - DNA, 36 bp, Artificial Sequence
  Description of Artificial Sequence: Synthetic probe
ttattactcgtaggcggttcggtattttcgtatagg

SEQ ID NO: 4014 - DNA, 19 bp, Artificial Sequence
  Description of Artificial Sequence: Synthetic primer
tccggcctttgacgatacc

SEQ ID NO: 4015 - DNA, 22 bp, Artificial Sequence
  Description of Artificial Sequence: Synthetic primer
tgctccgttcgagtgaattacc

SEQ ID NO: 4016 - DNA, 51 bp, Artificial Sequence
  Description of Artificial Sequence: Synthetic primer
  Description of Combined DNA/RNA Molecule: Synthetic primer
tgctccgttcgagtgaattaccgcacgactaaaaccccaaaaactgacccg

SEQ ID NO: 4017 - DNA, 27 bp, Artificial Sequence
  Description of Artificial Sequence: Synthetic primer
  Description of Combined DNA/RNA Molecule: Synthetic primer
tcgtgcgatttcggaattatacgtgta

SEQ ID NO: 4018 - DNA, 34 bp, Artificial Sequence
  Description of Artificial Sequence: Synthetic primer
  Description of Combined DNA/RNA Molecule: Synthetic primer
ggtgtcgtgggccccctaaaaccgaaaaaatatg

SEQ ID NO: 4019 - DNA, 50 bp, Artificial Sequence
  Description of Artificial Sequence: Synthetic oligonucleotide
  Description of Combined DNA/RNA Molecule: Synthetic oligonucleotide
tcgcggaaagtcccagtaaccggaattatacgtgtggcgagggacgggcc

SEQ ID NO: 4020 - DNA, 45 bp, Artificial Sequence
  Description of Artificial Sequence: Synthetic oligonucleotide
gggtttcggagcggagtaggtagaggttggcctgtaagcgttcca

SEQ ID NO: 4021 - DNA, 22 bp, Artificial Sequence
  Description of Artificial Sequence: Synthetic probe
ttgagggacgggtttcggagcg

SEQ ID NO: 4022 - DNA, 20 bp, Artificial Sequence
  Description of Artificial Sequence: Synthetic primer
tcgcggaaagtcccagtaac

SEQ ID NO: 4023 - DNA, 20 bp, Artificial Sequence
  Description of Artificial Sequence: Synthetic primer
tggaacgcttacaggccaac

SEQ ID NO: 4024 - DNA, 61 bp, Artificial Sequence
  Description of Artificial Sequence: Synthetic primer
  Description of Combined DNA/RNA Molecule: Synthetic primer
tggaacgcttacaggccaacccccctaaaaccgaaaaaatataactaaaaaatatgcttag

SEQ ID NO: 4025 - DNA, 20 bp, Artificial Sequence
  Description of Artificial Sequence: Synthetic primer
  Description of Combined DNA/RNA Molecule: Synthetic primer
cgtgtcgttcgaggcgggac

SEQ ID NO: 4026 - DNA, 41 bp, Artificial Sequence
  Description of Artificial Sequence: Synthetic primer
  Description of Combined DNA/RNA Molecule: Synthetic primer
ggtgtcgtggctaatattttcgaaattcgaacaccaaaaag

SEQ ID NO: 4027 - DNA, 53 bp, Artificial Sequence
  Description of Artificial Sequence: Synthetic oligonucleotide
  Description of Combined DNA/RNA Molecule: Synthetic oligonucleotide
tgaacgctcaaacacgtgaacgcgaggtcggaagttgatttatttctcgatga

SEQ ID NO: 4028 - DNA, 58 bp, Artificial Sequence
  Description of Artificial Sequence: Synthetic oligonucleotide
gatagatagatagatttggagcggacgtattgtttacggttggcctgtaagcgttcca

SEQ ID NO: 4029 - DNA, 41 bp, Artificial Sequence
  Description of Artificial Sequence: Synthetic probe
aaatttctcgatagatagatagatttggagcggacgtattg

SEQ ID NO: 4030 - DNA, 21 bp, Artificial Sequence
  Description of Artificial Sequence: Synthetic primer
tgaacgctcaaacacgtgaac

SEQ ID NO: 4031 - DNA, 20 bp, Artificial Sequence
  Description of Artificial Sequence: Synthetic primer
tggaacgcttacaggccaac

SEQ ID NO: 4032 - DNA, 59 bp, Artificial Sequence
  Description of Artificial Sequence: Synthetic primer
  Description of Combined DNA/RNA Molecule: Synthetic primer
tggaacgcttacaggccaacctaatattttcgaaattcgaacaccaaaaaactguaaat

SEQ ID NO: 4033 - DNA, 35 bp, Artificial Sequence
  Description of Artificial Sequence: Synthetic primer
  Description of Combined DNA/RNA Molecule: Synthetic primer
ttatttttttttttgtagttttgaaagttcggttt

SEQ ID NO: 4034 - DNA, 33 bp, Artificial Sequence
  Description of Artificial Sequence: Synthetic primer
  Description of Combined DNA/RNA Molecule: Synthetic primer
ggtgtcgtggctaacctaacccgcccaaccccc

SEQ ID NO: 4035 - DNA, 52 bp, Artificial Sequence
  Description of Artificial Sequence: Synthetic oligonucleotide
  Description of Combined DNA/RNA Molecule: Synthetic oligonucleotide
tacacgtggatatctccgacctgtagttttgaaagttcggttcgggcgcgag

SEQ ID NO: 4036 - DNA, 38 bp, Artificial Sequence
  Description of Artificial Sequence: Synthetic oligonucleotide
gcggacgggacggagagggtgctagtcacacagttcca

SEQ ID NO: 4037 - DNA, 18 bp, Artificial Sequence
  Description of Artificial Sequence: Synthetic probe
ttttcgggcgcggacggg

SEQ ID NO: 4038 - DNA, 21 bp, Artificial Sequence
  Description of Artificial Sequence: Synthetic primer
tacacgtggatatctccgacc

SEQ ID NO: 4039 - DNA, 21 bp, Artificial Sequence
  Description of Artificial Sequence: Synthetic primer
tggaactgtgtgactagcacc

SEQ ID NO: 4040 - DNA, 42 bp, Artificial Sequence
  Description of Artificial Sequence: Synthetic primer
  Description of Combined DNA/RNA Molecule: Synthetic primer
tggaactgtgtgactagcaccgcccaacccctccctgcccca

SEQ ID NO: 4041 - DNA, 28 bp, Artificial Sequence
  Description of Artificial Sequence: Synthetic primer
  Description of Combined DNA/RNA Molecule: Synthetic primer
cggttttaggaatttatgttcgcgcggc

SEQ ID NO: 4042 - DNA, 36 bp, Artificial Sequence
  Description of Artificial Sequence: Synthetic primer
  Description of Combined DNA/RNA Molecule: Synthetic primer
ggtgtcgtggcaaaaacgcctcgaaacgaaaaatct

SEQ ID NO: 4043 - DNA, 43 bp, Artificial Sequence
  Description of Artificial Sequence: Synthetic oligonucleotide
  Description of Combined DNA/RNA Molecule: Synthetic oligonucleotide
tagcattcgagaacgcacccgcgcggtgtagtaggaacggtcg

SEQ ID NO: 4044 - DNA, 52 bp, Artificial Sequence
  Description of Artificial Sequence: Synthetic oligonucleotide
ggttaaatggagttcgggttagagcgagatcggtgctagtcacacagttcca

SEQ ID NO: 4045 - DNA, 33 bp, Artificial Sequence
  Description of Artificial Sequence: Synthetic probe
tttaggaacggttaaatggagttcgggttagag

SEQ ID NO: 4046 - DNA, 19 bp, Artificial Sequence
  Description of Artificial Sequence: Synthetic primer
tagcattcgagaacgcacc

SEQ ID NO: 4047 - DNA, 21 bp, Artificial Sequence
  Description of Artificial Sequence: Synthetic primer
tggaactgtgtgactagcacc

SEQ ID NO: 4048 - DNA, 51 bp, Artificial Sequence
  Description of Artificial Sequence: Synthetic primer
  Description of Combined DNA/RNA Molecule: Synthetic primer
tggaactgtgtgactagcaccctcgaaacgaaaaatcccgatcttgctctg

SEQ ID NO: 4049 - DNA, 32 bp, Artificial Sequence; identical to SEQ ID NO: 965
  Description of Artificial Sequence: Synthetic primer
  Description of Combined DNA/RNA Molecule: Synthetic primer

SEQ ID NO: 4050 - DNA, 39 bp, Artificial Sequence; identical to SEQ ID NO: 966
  Description of Artificial Sequence: Synthetic primer
  Description of Combined DNA/RNA Molecule: Synthetic primer

SEQ ID NO: 4051 - DNA, 54 bp, Artificial Sequence; identical to SEQ ID NO: 967
  Description of Artificial Sequence: Synthetic oligonucleotide
  Description of Combined DNA/RNA Molecule: Synthetic oligonucleotide

SEQ ID NO: 4052 - DNA, 52 bp, Artificial Sequence; identical to SEQ ID NO: 968
  Description of Artificial Sequence: Synthetic oligonucleotide

SEQ ID NO: 4053 - DNA, 38 bp, Artificial Sequence; identical to SEQ ID NO: 969
  Description of Artificial Sequence: Synthetic probe

SEQ ID NO: 4054 - DNA, 22 bp, Artificial Sequence
  Description of Artificial Sequence: Synthetic primer
tatctcctaaaagaagccgcac

SEQ ID NO: 4055 - DNA, 20 bp, Artificial Sequence
  Description of Artificial Sequence: Synthetic primer
tccatcgcccttaatcccac

SEQ ID NO: 4056 - DNA, 50 bp, Artificial Sequence; identical to SEQ ID NO: 972
  Description of Artificial Sequence: Synthetic primer
  Description of Combined DNA/RNA Molecule: Synthetic primer

SEQ ID NO: 4057 - DNA, 21 bp, Artificial Sequence
  Description of Artificial Sequence: Synthetic primer
  Description of Combined DNA/RNA Molecule: Synthetic primer
ggtaagatcgaggcgcgtttg

SEQ ID NO: 4058 - DNA, 34 bp, Artificial Sequence; identical to SEQ ID NO: 974
  Description of Artificial Sequence: Synthetic primer
  Description of Combined DNA/RNA Molecule: Synthetic primer

SEQ ID NO: 4059 - DNA, 48 bp, Artificial Sequence; identical to SEQ ID NO: 975
  Description of Artificial Sequence: Synthetic oligonucleotide
  Description of Combined DNA/RNA Molecule: Synthetic oligonucleotide

SEQ ID NO: 4060 - DNA, 59 bp, Artificial Sequence; identical to SEQ ID NO: 976
  Description of Artificial Sequence: Synthetic oligonucleotide

SEQ ID NO: 4061 - DNA, 37 bp, Artificial Sequence; identical to SEQ ID NO: 977
  Description of Artificial Sequence: Synthetic probe

SEQ ID NO: 4062 - DNA, 20 bp, Artificial Sequence
  Description of Artificial Sequence: Synthetic primer
tcgctcttcagcctcctaca

SEQ ID NO: 4063 - DNA, 22 bp, Artificial Sequence
  Description of Artificial Sequence: Synthetic primer
tccggcaataattcccagaaca

SEQ ID NO: 4064 - DNA, 49 bp, Artificial Sequence; identical to SEQ ID NO: 980
  Description of Artificial Sequence: Synthetic primer
  Description of Combined DNA/RNA Molecule: Synthetic primer

SEQ ID NO: 4065 - DNA, 21 bp, Artificial Sequence
  Description of Artificial Sequence: Synthetic primer
  Description of Combined DNA/RNA Molecule: Synthetic primer
gacggaagcggagagcggaac

SEQ ID NO: 4066 - DNA, 36 bp, Artificial Sequence; identical to SEQ ID NO: 982
  Description of Artificial Sequence: Synthetic primer
  Description of Combined DNA/RNA Molecule: Synthetic primer

SEQ ID NO: 4067 - DNA, 50 bp, Artificial Sequence; identical to SEQ ID NO: 983
  Description of Artificial Sequence: Synthetic oligonucleotide
  Description of Combined DNA/RNA Molecule: Synthetic oligonucleotide

SEQ ID NO: 4068 - DNA, 55 bp, Artificial Sequence; identical to SEQ ID NO: 984
  Description of Artificial Sequence: Synthetic oligonucleotide

SEQ ID NO: 4069 - DNA, 32 bp, Artificial Sequence; identical to SEQ ID NO: 985
  Description of Artificial Sequence: Synthetic probe

SEQ ID NO: 4070 - DNA, 19 bp, Artificial Sequence
  Description of Artificial Sequence: Synthetic primer
ttcaacgatcgcgcagaca

SEQ ID NO: 4071 - DNA, 22 bp, Artificial Sequence
  Description of Artificial Sequence: Synthetic primer
tccggcaataattcccagaaca

SEQ ID NO: 4072 - DNA, 58 bp, Artificial Sequence; identical to SEQ ID NO: 988
  Description of Artificial Sequence: Synthetic primer
  Description of Combined DNA/RNA Molecule: Synthetic primer

SEQ ID NO: 4073 - DNA, 28 bp, Artificial Sequence
  Description of Artificial Sequence: Synthetic primer
  Description of Combined DNA/RNA Molecule: Synthetic primer
tttagagtcgaggtttgtaaatcgaggc

SEQ ID NO: 4074 - DNA, 32 bp, Artificial Sequence; identical to SEQ ID NO: 990
  Description of Artificial Sequence: Synthetic primer
  Description of Combined DNA/RNA Molecule: Synthetic primer

SEQ ID NO: 4075 - DNA, 51 bp, Artificial Sequence; identical to SEQ ID NO: 991
  Description of Artificial Sequence: Synthetic oligonucleotide
  Description of Combined DNA/RNA Molecule: Synthetic oligonucleotide

SEQ ID NO: 4076 - DNA, 58 bp, Artificial Sequence; identical to SEQ ID NO: 992
  Description of Artificial Sequence: Synthetic oligonucleotide

SEQ ID NO: 4077 - DNA, 31 bp, Artificial Sequence; identical to SEQ ID NO: 993
  Description of Artificial Sequence: Synthetic probe

SEQ ID NO: 4078 - DNA, 21 bp, Artificial Sequence
  Description of Artificial Sequence: Synthetic primer
tcactatcggcgtagtcacca

SEQ ID NO: 4079 - DNA, 20 bp, Artificial Sequence
  Description of Artificial Sequence: Synthetic primer
tcctccgggtaaagtcacca

SEQ ID NO: 4080 - DNA, 57 bp, Artificial Sequence; identical to SEQ ID NO: 996
  Description of Artificial Sequence: Synthetic primer
  Description of Combined DNA/RNA Molecule: Synthetic primer

SEQ ID NO: 4081 - DNA, 23 bp, Artificial Sequence
  Description of Artificial Sequence: Synthetic primer
  Description of Combined DNA/RNA Molecule: Synthetic primer
cgggacgggtttttttgcggatc

SEQ ID NO: 4082 - DNA, 38 bp, Artificial Sequence; identical to SEQ ID NO: 998
  Description of Artificial Sequence: Synthetic primer
  Description of Combined DNA/RNA Molecule: Synthetic primer

SEQ ID NO: 4083 - DNA, 61 bp, Artificial Sequence; identical to SEQ ID NO: 999
  Description of Artificial Sequence: Synthetic oligonucleotide
  Description of Combined DNA/RNA Molecule: Synthetic oligonucleotide

SEQ ID NO: 4084 - DNA, 53 bp, Artificial Sequence; identical to SEQ ID NO: 1000
  Description of Artificial Sequence: Synthetic oligonucleotide

SEQ ID NO: 4085 - DNA, 33 bp, Artificial Sequence; identical to SEQ ID NO: 1001
  Description of Artificial Sequence: Synthetic probe

SEQ ID NO: 4086 - DNA, 21 bp, Artificial Sequence
  Description of Artificial Sequence: Synthetic primer
tcatctgttcgtcagggtcca

SEQ ID NO: 4087 - DNA, 20 bp, Artificial Sequence
  Description of Artificial Sequence: Synthetic primer
tcctccgggtaaagtcacca

SEQ ID NO: 4088 - DNA, 50 bp, Artificial Sequence; identical to SEQ ID NO: 1004
  Description of Artificial Sequence: Synthetic primer
  Description of Combined DNA/RNA Molecule: Synthetic primer

SEQ ID NO: 4089 - DNA, 23 bp, Artificial Sequence
  Description of Artificial Sequence: Synthetic primer
  Description of Combined DNA/RNA Molecule: Synthetic primer
tagtttttcggtggcggcggcgc

SEQ ID NO: 4090 - DNA, 33 bp, Artificial Sequence; identical to SEQ ID NO: 1006
  Description of Artificial Sequence: Synthetic primer
  Description of Combined DNA/RNA Molecule: Synthetic primer

SEQ ID NO: 4091 - DNA, 46 bp, Artificial Sequence; identical to SEQ ID NO: 1007
  Description of Artificial Sequence: Synthetic oligonucleotide
  Description of Combined DNA/RNA Molecule: Synthetic oligonucleotide

SEQ ID NO: 4092 - DNA, 61 bp, Artificial Sequence; identical to SEQ ID NO: 1008
  Description of Artificial Sequence: Synthetic oligonucleotide

SEQ ID NO: 4093 - DNA, 41 bp, Artificial Sequence; identical to SEQ ID NO: 1009
  Description of Artificial Sequence: Synthetic probe

SEQ ID NO: 4094 - DNA, 19 bp, Artificial Sequence
  Description of Artificial Sequence: Synthetic primer
ttcgtacctcggcacacca

SEQ ID NO: 4095 - DNA, 20 bp, Artificial Sequence
  Description of Artificial Sequence: Synthetic primer
tcgacagagtaacggagcca

SEQ ID NO: 4096 - DNA, 51 bp, Artificial Sequence; identical to SEQ ID NO: 1012
  Description of Artificial Sequence: Synthetic primer
  Description of Combined DNA/RNA Molecule: Synthetic primer

SEQ ID NO: 4097 - DNA, 27 bp, Artificial Sequence
  Description of Artificial Sequence: Synthetic primer
  Description of Combined DNA/RNA Molecule: Synthetic primer
taaatgtaaacgtcgagggtacgggat

SEQ ID NO: 4098 - DNA, 42 bp, Artificial Sequence; identical to SEQ ID NO: 1014
  Description of Artificial Sequence: Synthetic primer
  Description of Combined DNA/RNA Molecule: Synthetic primer

SEQ ID NO: 4099 - DNA, 49 bp, Artificial Sequence; identical to SEQ ID NO: 1015
  Description of Artificial Sequence: Synthetic oligonucleotide
  Description of Combined DNA/RNA Molecule: Synthetic oligonucleotide

SEQ ID NO: 4100 - DNA, 56 bp, Artificial Sequence; identical to SEQ ID NO: 1016
  Description of Artificial Sequence: Synthetic oligonucleotide

SEQ ID NO: 4101 - DNA, 34 bp, Artificial Sequence; identical to SEQ ID NO: 1017
  Description of Artificial Sequence: Synthetic probe

SEQ ID NO: 4102 - DNA, 20 bp, Artificial Sequence
  Description of Artificial Sequence: Synthetic primer
tctacagctagatgcggcca

SEQ ID NO: 4103 - DNA, 20 bp, Artificial Sequence
  Description of Artificial Sequence: Synthetic primer
tcgacagagtaacggagcca

SEQ ID NO: 4104 - DNA, 24 bp, Artificial Sequence
  Description of Artificial Sequence: Synthetic primer
  Description of Combined DNA/RNA Molecule: Synthetic primer
gtcgtttcgaggagttttcgcgaa

SEQ ID NO: 4105 - DNA, 31 bp, Artificial Sequence; identical to SEQ ID NO: 1021
  Description of Artificial Sequence: Synthetic primer
  Description of Combined DNA/RNA Molecule: Synthetic primer

SEQ ID NO: 4106 - DNA, 50 bp, Artificial Sequence; identical to SEQ ID NO: 1022
  Description of Artificial Sequence: Synthetic oligonucleotide
  Description of Combined DNA/RNA Molecule: Synthetic oligonucleotide

SEQ ID NO: 4107 - DNA, 57 bp, Artificial Sequence; identical to SEQ ID NO: 1023
  Description of Artificial Sequence: Synthetic oligonucleotide

SEQ ID NO: 4108 - DNA, 37 bp, Artificial Sequence; identical to SEQ ID NO: 1024
  Description of Artificial Sequence: Synthetic probe

SEQ ID NO: 4109 - DNA, 22 bp, Artificial Sequence
  Description of Artificial Sequence: Synthetic primer
tagcgatagtaccgacagtcac

SEQ ID NO: 4110 - DNA, 20 bp, Artificial Sequence
  Description of Artificial Sequence: Synthetic primer
tcgacgataggtttccgcac

SEQ ID NO: 4111 - DNA, 46 bp, Artificial Sequence; identical to SEQ ID NO: 1027
  Description of Artificial Sequence: Synthetic primer
  Description of Combined DNA/RNA Molecule: Synthetic primer

SEQ ID NO: 4112 - DNA, 21 bp, Artificial Sequence
  Description of Artificial Sequence: Synthetic primer
  Description of Combined DNA/RNA Molecule: Synthetic primer
tcgagttttgggcggcggagc

SEQ ID NO: 4113 - DNA, 32 bp, Artificial Sequence; identical to SEQ ID NO: 1029
  Description of Artificial Sequence: Synthetic primer
  Description of Combined DNA/RNA Molecule: Synthetic primer

SEQ ID NO: 4114 - DNA, 43 bp, Artificial Sequence; identical to SEQ ID NO: 1030
  Description of Artificial Sequence: Synthetic oligonucleotide
  Description of Combined DNA/RNA Molecule: Synthetic oligonucleotide

SEQ ID NO: 4115 - DNA, 39 bp, Artificial Sequence; identical to SEQ ID NO: 1031
  Description of Artificial Sequence: Synthetic oligonucleotide

SEQ ID NO: 4116 - DNA, 18 bp, Artificial Sequence
  Description of Artificial Sequence: Synthetic probe
ccagggtgcgggtgggcg

SEQ ID NO: 4117 - DNA, 19 bp, Artificial Sequence
  Description of Artificial Sequence: Synthetic primer
tccagggtatttggcgcac

SEQ ID NO: 4118 - DNA, 20 bp, Artificial Sequence
  Description of Artificial Sequence: Synthetic primer
tcgacgataggtttccgcac

SEQ ID NO: 4119 - DNA, 48 bp, Artificial Sequence; identical to SEQ ID NO: 1035
  Description of Artificial Sequence: Synthetic primer
  Description of Combined DNA/RNA Molecule: Synthetic primer

SEQ ID NO: 4120 - DNA, 25 bp, Artificial Sequence
  Description of Artificial Sequence: Synthetic primer
  Description of Combined DNA/RNA Molecule: Synthetic primer
gattcggaggatggattagcgttgc

SEQ ID NO: 4121 - DNA, 30 bp, Artificial Sequence; identical to SEQ ID NO: 1037
  Description of Artificial Sequence: Synthetic primer
  Description of Combined DNA/RNA Molecule: Synthetic primer

SEQ ID NO: 4122 - DNA, 51 bp, Artificial Sequence; identical to SEQ ID NO: 1038
  Description of Artificial Sequence: Synthetic oligonucleotide
  Description of Combined DNA/RNA Molecule: Synthetic oligonucleotide

SEQ ID NO: 4123 - DNA, 47 bp, Artificial Sequence; identical to SEQ ID NO: 1039
  Description of Artificial Sequence: Synthetic oligonucleotide

SEQ ID NO: 4124 - DNA, 28 bp, Artificial Sequence
  Description of Artificial Sequence: Synthetic probe
ttgattctcgttaggaggatttcgcggg

SEQ ID NO: 4125 - DNA, 21 bp, Artificial Sequence
  Description of Artificial Sequence: Synthetic primer
tccctcgtcatctcccttacc

SEQ ID NO: 4126 - DNA, 19 bp, Artificial Sequence
  Description of Artificial Sequence: Synthetic primer
tcgctccatcaccaagacc

SEQ ID NO: 4127 - DNA, 42 bp, Artificial Sequence; identical to SEQ ID NO: 1043
  Description of Artificial Sequence: Synthetic primer
  Description of Combined DNA/RNA Molecule: Synthetic primer

SEQ ID NO: 4128 - DNA, 20 bp, Artificial Sequence
  Description of Artificial Sequence: Synthetic primer
  Description of Combined DNA/RNA Molecule: Synthetic primer
gaggcgggtgtttgcgggac

SEQ ID NO: 4129 - DNA, 35 bp, Artificial Sequence; identical to SEQ ID NO: 1045
  Description of Artificial Sequence: Synthetic primer
  Description of Combined DNA/RNA Molecule: Synthetic primer

SEQ ID NO: 4130 - DNA, 47 bp, Artificial Sequence; identical to SEQ ID NO: 1046
  Description of Artificial Sequence: Synthetic oligonucleotide
  Description of Combined DNA/RNA Molecule: Synthetic oligonucleotide

SEQ ID NO: 4131 - DNA, 52 bp, Artificial Sequence; identical to SEQ ID NO: 1047
  Description of Artificial Sequence: Synthetic oligonucleotide

SEQ ID NO: 4132 - DNA, 32 bp, Artificial Sequence; identical to SEQ ID NO: 1048
  Description of Artificial Sequence: Synthetic probe

SEQ ID NO: 4133 - DNA, 22 bp, Artificial Sequence
  Description of Artificial Sequence: Synthetic primer
tcataatgttgtcagcccgacc

SEQ ID NO: 4134 - DNA, 19 bp, Artificial Sequence
  Description of Artificial Sequence: Synthetic primer
tcgctccatcaccaagacc

SEQ ID NO: 4135 - DNA, 52 bp, Artificial Sequence; identical to SEQ ID NO: 1051
  Description of Artificial Sequence: Synthetic primer
  Description of Combined DNA/RNA Molecule: Synthetic primer

SEQ ID NO: 4136 - DNA, 31 bp, Artificial Sequence; identical to SEQ ID NO: 1298
  Description of Artificial Sequence: Synthetic primer
  Description of Combined DNA/RNA Molecule: Synthetic primer

SEQ ID NO: 4137 - DNA, 35 bp, Artificial Sequence; identical to SEQ ID NO: 1299
  Description of Artificial Sequence: Synthetic primer
  Description of Combined DNA/RNA Molecule: Synthetic primer

SEQ ID NO: 4138 - DNA, 57 bp, Artificial Sequence; identical to SEQ ID NO: 1300
  Description of Artificial Sequence: Synthetic oligonucleotide
  Description of Combined DNA/RNA Molecule: Synthetic oligonucleotide

SEQ ID NO: 4139 - DNA, 52 bp, Artificial Sequence; identical to SEQ ID NO: 1301
  Description of Artificial Sequence: Synthetic oligonucleotide

SEQ ID NO: 4140 - DNA, 32 bp, Artificial Sequence; identical to SEQ ID NO: 1302
  Description of Artificial Sequence: Synthetic probe

SEQ ID NO: 4141 - DNA, 22 bp, Artificial Sequence
  Description of Artificial Sequence: Synthetic primer
tcctgagggacaaatacacacc

SEQ ID NO: 4142 - DNA, 21 bp, Artificial Sequence
  Description of Artificial Sequence: Synthetic primer
tgcgtgacttccttacctacc

SEQ ID NO: 4143 - DNA, 49 bp, Artificial Sequence; identical to SEQ ID NO: 1305
  Description of Artificial Sequence: Synthetic primer
  Description of Combined DNA/RNA Molecule: Synthetic primer

SEQ ID NO: 4144 - DNA, 30 bp, Artificial Sequence; identical to SEQ ID NO: 1306
  Description of Artificial Sequence: Synthetic primer
  Description of Combined DNA/RNA Molecule: Synthetic primer

SEQ ID NO: 4145 - DNA, 31 bp, Artificial Sequence; identical to SEQ ID NO: 1307
  Description of Artificial Sequence: Synthetic primer
  Description of Combined DNA/RNA Molecule: Synthetic primer

SEQ ID NO: 4146 - DNA, 57 bp, Artificial Sequence; identical to SEQ ID NO: 1308
  Description of Artificial Sequence: Synthetic oligonucleotide
  Description of Combined DNA/RNA Molecule: Synthetic oligonucleotide

SEQ ID NO: 4147 - DNA, 69 bp, Artificial Sequence; identical to SEQ ID NO: 1309
  Description of Artificial Sequence: Synthetic oligonucleotide

SEQ ID NO: 4148 - DNA, 35 bp, Artificial Sequence; identical to SEQ ID NO: 1310
  Description of Artificial Sequence: Synthetic probe

SEQ ID NO: 4149 - DNA, 19 bp, Artificial Sequence
  Description of Artificial Sequence: Synthetic primer
ttgcaacaggctaccgacc

SEQ ID NO: 4150 - DNA, 21 bp, Artificial Sequence
  Description of Artificial Sequence: Synthetic primer
tgcgtgacttccttacctacc

SEQ ID NO: 4151 - DNA, 45 bp, Artificial Sequence; identical to SEQ ID NO: 1313
  Description of Artificial Sequence: Synthetic primer
  Description of Combined DNA/RNA Molecule: Synthetic primer

SEQ ID NO: 4152 - DNA, 27 bp, Artificial Sequence
  Description of Artificial Sequence: Synthetic primer
  Description of Combined DNA/RNA Molecule: Synthetic primer
ggtttttcgttcgaggaatttcgggaa

SEQ ID NO: 4153 - DNA, 41 bp, Artificial Sequence; identical to SEQ ID NO: 1315
  Description of Artificial Sequence: Synthetic primer
  Description of Combined DNA/RNA Molecule: Synthetic primer

SEQ ID NO: 4154 - DNA, 52 bp, Artificial Sequence; identical to SEQ ID NO: 1316
  Description of Artificial Sequence: Synthetic oligonucleotide
  Description of Combined DNA/RNA Molecule: Synthetic oligonucleotide

SEQ ID NO: 4155 - DNA, 65 bp, Artificial Sequence; identical to SEQ ID NO: 1317
  Description of Artificial Sequence: Synthetic oligonucleotide

SEQ ID NO: 4156 - DNA, 42 bp, Artificial Sequence; identical to SEQ ID NO: 1318
  Description of Artificial Sequence: Synthetic probe

SEQ ID NO: 4157 - DNA, 22 bp, Artificial Sequence
  Description of Artificial Sequence: Synthetic primer
taagcctgcttttccgaaacaa

SEQ ID NO: 4158 - DNA, 21 bp, Artificial Sequence
  Description of Artificial Sequence: Synthetic primer
tgctatcctggcgcaatacaa

SEQ ID NO: 4159 - DNA, 27 bp, Artificial Sequence
  Description of Artificial Sequence: Synthetic primer
  Description of Combined DNA/RNA Molecule: Synthetic primer
tagtttggacggtgtggatttcgggtc

SEQ ID NO: 4160 - DNA, 31 bp, Artificial Sequence; identical to SEQ ID NO: 1457
  Description of Artificial Sequence: Synthetic primer
  Description of Combined DNA/RNA Molecule: Synthetic primer

SEQ ID NO: 4161 - DNA, 46 bp, Artificial Sequence; identical to SEQ ID NO: 1458
  Description of Artificial Sequence: Synthetic oligonucleotide
  Description of Combined DNA/RNA Molecule: Synthetic oligonucleotide

SEQ ID NO: 4162 - DNA, 60 bp, Artificial Sequence; identical to SEQ ID NO: 1459
  Description of Artificial Sequence: Synthetic oligonucleotide

SEQ ID NO: 4163 - DNA, 32 bp, Artificial Sequence; identical to SEQ ID NO: 1460
  Description of Artificial Sequence: Synthetic probe

SEQ ID NO: 4164 - DNA, 19 bp, Artificial Sequence
  Description of Artificial Sequence: Synthetic primer
ttgctgtgcgcggtagaac

SEQ ID NO: 4165 - DNA, 20 bp, Artificial Sequence
  Description of Artificial Sequence: Synthetic primer
tggcaccagcttagcgtaac

SEQ ID NO: 4166 - DNA, 55 bp, Artificial Sequence; identical to SEQ ID NO: 1463
  Description of Artificial Sequence: Synthetic primer
  Description of Combined DNA/RNA Molecule: Synthetic primer

SEQ ID NO: 4167 - DNA, 24 bp, Artificial Sequence
  Description of Artificial Sequence: Synthetic primer
  Description of Combined DNA/RNA Molecule: Synthetic primer
aggtttaggttttcgaggcgtttc

SEQ ID NO: 4168 - DNA, 34 bp, Artificial Sequence; identical to SEQ ID NO: 1481
  Description of Artificial Sequence: Synthetic primer
  Description of Combined DNA/RNA Molecule: Synthetic primer

SEQ ID NO: 4169 - DNA, 58 bp, Artificial Sequence; identical to SEQ ID NO: 1482
  Description of Artificial Sequence: Synthetic oligonucleotide
  Description of Combined DNA/RNA Molecule: Synthetic oligonucleotide

SEQ ID NO: 4170 - DNA, 59 bp, Artificial Sequence; identical to SEQ ID NO: 1483
  Description of Artificial Sequence: Synthetic oligonucleotide

SEQ ID NO: 4171 - DNA, 41 bp, Artificial Sequence; identical to SEQ ID NO: 1484
  Description of Artificial Sequence: Synthetic probe

SEQ ID NO: 4172 - DNA, 21 bp, Artificial Sequence
  Description of Artificial Sequence: Synthetic primer
tcacagagacttgccgatcac

SEQ ID NO: 4173 - DNA, 22 bp, Artificial Sequence
  Description of Artificial Sequence: Synthetic primer
tggccatgtctaagctacacac

SEQ ID NO: 4174 - DNA, 51 bp, Artificial Sequence; identical to SEQ ID NO: 1487
  Description of Artificial Sequence: Synthetic primer
  Description of Combined DNA/RNA Molecule: Synthetic primer

SEQ ID NO: 4175 - DNA, 32 bp, Artificial Sequence; identical to SEQ ID NO: 1503
  Description of Artificial Sequence: Synthetic primer
  Description of Combined DNA/RNA Molecule: Synthetic primer

SEQ ID NO: 4176 - DNA, 43 bp, Artificial Sequence; identical to SEQ ID NO: 1504
  Description of Artificial Sequence: Synthetic primer
  Description of Combined DNA/RNA Molecule: Synthetic primer

SEQ ID NO: 4177 - DNA, 62 bp, Artificial Sequence; identical to SEQ ID NO: 1505
  Description of Artificial Sequence: Synthetic oligonucleotide
  Description of Combined DNA/RNA Molecule: Synthetic oligonucleotide

SEQ ID NO: 4178 - DNA, 55 bp, Artificial Sequence; identical to SEQ ID NO: 1506
  Description of Artificial Sequence: Synthetic oligonucleotide

SEQ ID NO: 4179 - DNA, 37 bp, Artificial Sequence; identical to SEQ ID NO: 1507
  Description of Artificial Sequence: Synthetic probe

SEQ ID NO: 4180 - DNA, 22 bp, Artificial Sequence
  Description of Artificial Sequence: Synthetic primer
tgatgctggcaaaccctagaac

SEQ ID NO: 4181 - DNA, 20 bp, Artificial Sequence
  Description of Artificial Sequence: Synthetic primer
tggcctaacggtgatggaac

SEQ ID NO: 4182 - DNA, 59 bp, Artificial Sequence; identical to SEQ ID NO: 1510
  Description of Artificial Sequence: Synthetic primer
  Description of Combined DNA/RNA Molecule: Synthetic primer

SEQ ID NO: 4183 - DNA, 26 bp, Artificial Sequence
  Description of Artificial Sequence: Synthetic primer
  Description of Combined DNA/RNA Molecule: Synthetic primer
ggttcgtggtgacggttatacgggtg

SEQ ID NO: 4184 - DNA, 39 bp, Artificial Sequence; identical to SEQ ID NO: 1512
  Description of Artificial Sequence: Synthetic primer
  Description of Combined DNA/RNA Molecule: Synthetic primer

SEQ ID NO: 4185 - DNA, 45 bp, Artificial Sequence; identical to SEQ ID NO: 1513
  Description of Artificial Sequence: Synthetic oligonucleotide
  Description of Combined DNA/RNA Molecule: Synthetic oligonucleotide

SEQ ID NO: 4186 - DNA, 54 bp, Artificial Sequence; identical to SEQ ID NO: 1514
  Description of Artificial Sequence: Synthetic oligonucleotide

SEQ ID NO: 4187 - DNA, 28 bp, Artificial Sequence
  Description of Artificial Sequence: Synthetic probe
ttgaatggcggagttgtggttgaggttg

SEQ ID NO: 4188 - DNA, 19 bp, Artificial Sequence
  Description of Artificial Sequence: Synthetic primer
ttttcggcatccgcttcca

SEQ ID NO: 4189 - DNA, 21 bp, Artificial Sequence
  Description of Artificial Sequence: Synthetic primer
tggcctgtcctctgttaacca

SEQ ID NO: 4190 - DNA, 56 bp, Artificial Sequence; identical to SEQ ID NO: 1518
  Description of Artificial Sequence: Synthetic primer
  Description of Combined DNA/RNA Molecule: Synthetic primer

SEQ ID NO: 4191 - DNA, 21 bp, Artificial Sequence
  Description of Artificial Sequence: Synthetic primer
  Description of Combined DNA/RNA Molecule: Synthetic primer
ggagggcgtttttcgcgttgc

SEQ ID NO: 4192 - DNA, 30 bp, Artificial Sequence; identical to SEQ ID NO: 1703
  Description of Artificial Sequence: Synthetic primer
  Description of Combined DNA/RNA Molecule: Synthetic primer

SEQ ID NO: 4193 - DNA, 53 bp, Artificial Sequence; identical to SEQ ID NO: 1704
  Description of Artificial Sequence: Synthetic oligonucleotide
  Description of Combined DNA/RNA Molecule: Synthetic oligonucleotide

SEQ ID NO: 4194 - DNA, 59 bp, Artificial Sequence; identical to SEQ ID NO: 1705
  Description of Artificial Sequence: Synthetic oligonucleotide

SEQ ID NO: 4195 - DNA, 35 bp, Artificial Sequence; identical to SEQ ID NO: 1706
  Description of Artificial Sequence: Synthetic probe

SEQ ID NO: 4196 - DNA, 20 bp, Artificial Sequence
  Description of Artificial Sequence: Synthetic primer
tttttacgcacagcaccacc

SEQ ID NO: 4197 - DNA, 22 bp, Artificial Sequence
  Description of Artificial Sequence: Synthetic primer
tgtctaagccgcctatgtaacc

SEQ ID NO: 4198 - DNA, 52 bp, Artificial Sequence; identical to SEQ ID NO: 1709
  Description of Artificial Sequence: Synthetic primer
  Description of Combined DNA/RNA Molecule: Synthetic primer

SEQ ID NO: 4199 - DNA, 29 bp, Artificial Sequence
  Description of Artificial Sequence: Synthetic primer
  Description of Combined DNA/RNA Molecule: Synthetic primer
gtacggtcgtttcgtttttagttcggttg

SEQ ID NO: 4200 - DNA, 32 bp, Artificial Sequence; identical to SEQ ID NO: 1711
  Description of Artificial Sequence: Synthetic primer
  Description of Combined DNA/RNA Molecule: Synthetic primer

SEQ ID NO: 4201 - DNA, 60 bp, Artificial Sequence; identical to SEQ ID NO: 1712
  Description of Artificial Sequence: Synthetic oligonucleotide
  Description of Combined DNA/RNA Molecule: Synthetic oligonucleotide

SEQ ID NO: 4202 - DNA, 67 bp, Artificial Sequence; identical to SEQ ID NO: 1713
  Description of Artificial Sequence: Synthetic oligonucleotide

SEQ ID NO: 4203 - DNA, 46 bp, Artificial Sequence; identical to SEQ ID NO: 1714
  Description of Artificial Sequence: Synthetic probe

SEQ ID NO: 4204 - DNA, 22 bp, Artificial Sequence
  Description of Artificial Sequence: Synthetic primer
tggacacttcgcccttcttaac

SEQ ID NO: 4205 - DNA, 21 bp, Artificial Sequence
  Description of Artificial Sequence: Synthetic primer
tgtgatgcccagatcccaaac

SEQ ID NO: 4206 - DNA, 49 bp, Artificial Sequence; identical to SEQ ID NO: 1717
  Description of Artificial Sequence: Synthetic primer
  Description of Combined DNA/RNA Molecule: Synthetic primer

SEQ ID NO: 4207 - DNA, 20 bp, Artificial Sequence
  Description of Artificial Sequence: Synthetic primer
  Description of Combined DNA/RNA Molecule: Synthetic primer
gggattgcgggacgcgggca

SEQ ID NO: 4208 - DNA, 34 bp, Artificial Sequence; identical to SEQ ID NO: 1719
  Description of Artificial Sequence: Synthetic primer
  Description of Combined DNA/RNA Molecule: Synthetic primer

SEQ ID NO: 4209 - DNA, 54 bp, Artificial Sequence; identical to SEQ ID NO: 1720
  Description of Artificial Sequence: Synthetic oligonucleotide
  Description of Combined DNA/RNA Molecule: Synthetic oligonucleotide

SEQ ID NO: 4210 - DNA, 37 bp, Artificial Sequence; identical to SEQ ID NO: 1721
  Description of Artificial Sequence: Synthetic oligonucleotide

SEQ ID NO: 4211 - DNA, 23 bp, Artificial Sequence
  Description of Artificial Sequence: Synthetic probe
aattaaatcggcgcggtcgcgtc

SEQ ID NO: 4212 - DNA, 21 bp, Artificial Sequence
  Description of Artificial Sequence: Synthetic primer
tggaggccggagaaattaaac

SEQ ID NO: 4213 - DNA, 21 bp, Artificial Sequence
  Description of Artificial Sequence: Synthetic primer
tgtgatgcccagatcccaaac

SEQ ID NO: 4214 - DNA, 59 bp, Artificial Sequence; identical to SEQ ID NO: 1725
  Description of Artificial Sequence: Synthetic primer
  Description of Combined DNA/RNA Molecule: Synthetic primer

SEQ ID NO: 4215 - DNA, 30 bp, Artificial Sequence; identical to SEQ ID NO: 1726
  Description of Artificial Sequence: Synthetic primer
  Description of Combined DNA/RNA Molecule: Synthetic primer

SEQ ID NO: 4216 - DNA, 39 bp, Artificial Sequence; identical to SEQ ID NO: 1727
  Description of Artificial Sequence: Synthetic primer
  Description of Combined DNA/RNA Molecule: Synthetic primer

SEQ ID NO: 4217 - DNA, 60 bp, Artificial Sequence; identical to SEQ ID NO: 1728
  Description of Artificial Sequence: Synthetic oligonucleotide
  Description of Combined DNA/RNA Molecule: Synthetic oligonucleotide

SEQ ID NO: 4218 - DNA, 41 bp, Artificial Sequence; identical to SEQ ID NO: 1729
  Description of Artificial Sequence: Synthetic oligonucleotide

SEQ ID NO: 4219 - DNA, 23 bp, Artificial Sequence
  Description of Artificial Sequence: Synthetic probe
aacgtttgcggagaggaggttcg

SEQ ID NO: 4220 - DNA, 20 bp, Artificial Sequence
  Description of Artificial Sequence: Synthetic primer
ttgtctctgcgacccatcaa

SEQ ID NO: 4221 - DNA, 19 bp, Artificial Sequence
  Description of Artificial Sequence: Synthetic primer
tgtgccgaacgtgtaccaa

SEQ ID NO: 4222 - DNA, 43 bp, Artificial Sequence; identical to SEQ ID NO: 1733
  Description of Artificial Sequence: Synthetic primer
  Description of Combined DNA/RNA Molecule: Synthetic primer

SEQ ID NO: 4223 - DNA, 25 bp, Artificial Sequence
  Description of Artificial Sequence: Synthetic primer
  Description of Combined DNA/RNA Molecule: Synthetic primer
ttaagcgtagttggacgagcggtaa

SEQ ID NO: 4224 - DNA, 31 bp, Artificial Sequence; identical to SEQ ID NO: 1735
  Description of Artificial Sequence: Synthetic primer
  Description of Combined DNA/RNA Molecule: Synthetic primer

SEQ ID NO: 4225 - DNA, 44 bp, Artificial Sequence; identical to SEQ ID NO: 1736
  Description of Artificial Sequence: Synthetic oligonucleotide
  Description of Combined DNA/RNA Molecule: Synthetic oligonucleotide

SEQ ID NO: 4226 - DNA, 46 bp, Artificial Sequence; identical to SEQ ID NO: 1737
  Description of Artificial Sequence: Synthetic oligonucleotide

SEQ ID NO: 4227 - DNA, 30 bp, Artificial Sequence; identical to SEQ ID NO: 1738
  Description of Artificial Sequence: Synthetic probe

SEQ ID NO: 4228 - DNA, 19 bp, Artificial Sequence
  Description of Artificial Sequence: Synthetic primer
ttcgcctaccgcagtgaac

SEQ ID NO: 4229 - DNA, 19 bp, Artificial Sequence
  Description of Artificial Sequence: Synthetic primer
tgcgagcccatgtctcaac

SEQ ID NO: 4230 - DNA, 42 bp, Artificial Sequence; identical to SEQ ID NO: 1741
  Description of Artificial Sequence: Synthetic primer
  Description of Combined DNA/RNA Molecule: Synthetic primer

SEQ ID NO: 4231 - DNA, 27 bp, Artificial Sequence
  Description of Artificial Sequence: Synthetic primer
  Description of Combined DNA/RNA Molecule: Synthetic primer
tagttcgcgtttgtatcgagtcggttc

SEQ ID NO: 4232 - DNA, 36 bp, Artificial Sequence; identical to SEQ ID NO: 1790
  Description of Artificial Sequence: Synthetic primer
  Description of Combined DNA/RNA Molecule: Synthetic primer

SEQ ID NO: 4233 - DNA, 43 bp, Artificial Sequence; identical to SEQ ID NO: 1791
  Description of Artificial Sequence: Synthetic oligonucleotide
  Description of Combined DNA/RNA Molecule: Synthetic oligonucleotide

SEQ ID NO: 4234 - DNA, 54 bp, Artificial Sequence; identical to SEQ ID NO: 1792
  Description of Artificial Sequence: Synthetic oligonucleotide

SEQ ID NO: 4235 - DNA, 35 bp, Artificial Sequence; identical to SEQ ID NO: 1793
  Description of Artificial Sequence: Synthetic probe

SEQ ID NO: 4236 - DNA, 19 bp, Artificial Sequence
  Description of Artificial Sequence: Synthetic primer
tcgcaacgtgccgaataca

SEQ ID NO: 4237 - DNA, 19 bp, Artificial Sequence
  Description of Artificial Sequence: Synthetic primer
ttagctcgaccgtgcaaca

SEQ ID NO: 4238 - DNA, 48 bp, Artificial Sequence; identical to SEQ ID NO: 1796
  Description of Artificial Sequence: Synthetic primer
  Description of Combined DNA/RNA Molecule: Synthetic primer

SEQ ID NO: 4239 - DNA, 35 bp, Artificial Sequence; identical to SEQ ID NO: 1797
  Description of Artificial Sequence: Synthetic primer
  Description of Combined DNA/RNA Molecule: Synthetic primer

SEQ ID NO: 4240 - DNA, 39 bp, Artificial Sequence; identical to SEQ ID NO: 1798
  Description of Artificial Sequence: Synthetic primer
  Description of Combined DNA/RNA Molecule: Synthetic primer

SEQ ID NO: 4241 - DNA, 55 bp, Artificial Sequence; identical to SEQ ID NO: 1799
  Description of Artificial Sequence: Synthetic oligonucleotide
  Description of Combined DNA/RNA Molecule: Synthetic oligonucleotide

SEQ ID NO: 4242 - DNA, 65 bp, Artificial Sequence; identical to SEQ ID NO: 1800
  Description of Artificial Sequence: Synthetic oligonucleotide

SEQ ID NO: 4243 - DNA, 42 bp, Artificial Sequence; identical to SEQ ID NO: 1801
  Description of Artificial Sequence: Synthetic probe

SEQ ID NO: 4244 - DNA, 21 bp, Artificial Sequence
  Description of Artificial Sequence: Synthetic primer
taacgggattgagagtggaca

SEQ ID NO: 4245 - DNA, 19 bp, Artificial Sequence
  Description of Artificial Sequence: Synthetic primer
ttagtaagggcggcagaca

SEQ ID NO: 4246 - DNA, 55 bp, Artificial Sequence; identical to SEQ ID NO: 1804
  Description of Artificial Sequence: Synthetic primer
  Description of Combined DNA/RNA Molecule: Synthetic primer

SEQ ID NO: 4247 - DNA, 24 bp, Artificial Sequence
  Description of Artificial Sequence: Synthetic primer
  Description of Combined DNA/RNA Molecule: Synthetic primer
tcgttgttgatgtttgcgcgtttc

SEQ ID NO: 4248 - DNA, 40 bp, Artificial Sequence; identical to SEQ ID NO: 1806
  Description of Artificial Sequence: Synthetic primer
  Description of Combined DNA/RNA Molecule: Synthetic primer

SEQ ID NO: 4249 - DNA, 65 bp, Artificial Sequence; identical to SEQ ID NO: 1807
  Description of Artificial Sequence: Synthetic oligonucleotide
  Description of Combined DNA/RNA Molecule: Synthetic oligonucleotide

SEQ ID NO: 4250 - DNA, 56 bp, Artificial Sequence; identical to SEQ ID NO: 1808
  Description of Artificial Sequence: Synthetic oligonucleotide

SEQ ID NO: 4251 - DNA, 38 bp, Artificial Sequence; identical to SEQ ID NO: 1809
  Description of Artificial Sequence: Synthetic probe

SEQ ID NO: 4252 - DNA, 21 bp, Artificial Sequence
  Description of Artificial Sequence: Synthetic primer
taacgggattgagagtggaca

SEQ ID NO: 4253 - DNA, 19 bp, Artificial Sequence
  Description of Artificial Sequence: Synthetic primer
ttagtaagggcggcagaca

SEQ ID NO: 4254 - DNA, 29 bp, Artificial Sequence
  Description of Artificial Sequence: Synthetic primer
  Description of Combined DNA/RNA Molecule: Synthetic primer
ggcggagataaaattaataagcgcggttc

SEQ ID NO: 4255 - DNA, 36 bp, Artificial Sequence
  Description of Artificial Sequence: Synthetic primer
  Description of Combined DNA/RNA Molecule: Synthetic primer
ggtgtcgtggactcaatttaaacgacctcgcucgag

SEQ ID NO: 4256 - DNA, 52 bp, Artificial Sequence
  Description of Artificial Sequence: Synthetic oligonucleotide
  Description of Combined DNA/RNA Molecule: Synthetic oligonucleotide
taaccgggcctaaagtgacaaataagcgcggtttattttttaggtgcgagcg

SEQ ID NO: 4257 - DNA, 80 bp, Artificial Sequence
  Description of Artificial Sequence: Synthetic oligonucleotide
gagtattaattttagtcgtttattttttttttagagttaatttagagttattgtattttgttacgtgatctccctctcca

SEQ ID NO: 4258 - DNA, 51 bp, Artificial Sequence
  Description of Artificial Sequence: Synthetic probe
aataggtgcgagtattaattttagtcgtttattttttttttagagttaatt

SEQ ID NO: 4259 - DNA, 20 bp, Artificial Sequence
  Description of Artificial Sequence: Synthetic primer
taaccgggcctaaagtgaca

SEQ ID NO: 4260 - DNA, 22 bp, Artificial Sequence
  Description of Artificial Sequence: Synthetic primer
tggagagggagatcacgtaaca

SEQ ID NO: 4261 - DNA, 51 bp, Artificial Sequence
  Description of Artificial Sequence: Synthetic primer
  Description of Combined DNA/RNA Molecule: Synthetic primer
tggagagggagatcacgtaacaactcaatttaaacgacctcgcttgaaatg

SEQ ID NO: 4262 - DNA, 23 bp, Artificial Sequence
  Description of Artificial Sequence: Synthetic primer
  Description of Combined DNA/RNA Molecule: Synthetic primer
cgagaattagggtgaggcgatcc

SEQ ID NO: 4263 - DNA, 46 bp, Artificial Sequence
  Description of Artificial Sequence: Synthetic primer
  Description of Combined DNA/RNA Molecule: Synthetic primer
ggtgtcgtggaactaacataaaaaaaactaaacgtaaaaaactact

SEQ ID NO: 4264 - DNA, 60 bp, Artificial Sequence
  Description of Artificial Sequence: Synthetic oligonucleotide
  Description of Combined DNA/RNA Molecule: Synthetic oligonucleotide
tcgatggtcaatgagcttcacatagggtgaggcgattttatattttaagtaaaacgttta

SEQ ID NO: 4265 - DNA, 68 bp, Artificial Sequence
  Description of Artificial Sequence: Synthetic oligonucleotide
gttcgttgttttattaaaatagtttttttcgttaaaggaggagtagtgttacgtgatctccctctcca

SEQ ID NO: 4266 - DNA, 50 bp, Artificial Sequence
  Description of Artificial Sequence: Synthetic probe
ttgtaaaacgttcgttgttttattaaaatagtttttttcgttaaaggagg

SEQ ID NO: 4267 - DNA, 22 bp, Artificial Sequence
  Description of Artificial Sequence: Synthetic primer
tcgatggtcaatgagcttcaca

SEQ ID NO: 4268 - DNA, 22 bp, Artificial Sequence
  Description of Artificial Sequence: Synthetic primer
tggagagggagatcacgtaaca

SEQ ID NO: 4269 - DNA, 25 bp, Artificial Sequence
  Description of Artificial Sequence: Synthetic primer
  Description of Combined DNA/RNA Molecule: Synthetic primer
cgggttgggattacggtttcggtaa

SEQ ID NO: 4270 - DNA, 36 bp, Artificial Sequence
  Description of Artificial Sequence: Synthetic primer
  Description of Combined DNA/RNA Molecule: Synthetic primer
ggtgtcgtggataaacgcctaacaacactccctaac

SEQ ID NO: 4271 - DNA, 58 bp, Artificial Sequence
  Description of Artificial Sequence: Synthetic oligonucleotide
  Description of Combined DNA/RNA Molecule: Synthetic oligonucleotide
tcgatggtcaatgagcttcacacggtttcggtagagagggtgtttagatagtcgatga

SEQ ID NO: 4272 - DNA, 70 bp, Artificial Sequence
  Description of Artificial Sequence: Synthetic oligonucleotide
gatagcgttttttttatttttattattgttcgatttatttcgggttggtgttacgtgatctccctctcca

SEQ ID NO: 4273 - DNA, 49 bp, Artificial Sequence
  Description of Artificial Sequence: Synthetic probe
ccgatagtcgatagcgttttttttatttttattattgttcgatttattt

SEQ ID NO: 4274 - DNA, 22 bp, Artificial Sequence
  Description of Artificial Sequence: Synthetic primer
tcgatggtcaatgagcttcaca

SEQ ID NO: 4275 - DNA, 22 bp, Artificial Sequence
  Description of Artificial Sequence: Synthetic primer
tggagagggagatcacgtaaca

SEQ ID NO: 4276 - DNA, 54 bp, Artificial Sequence
  Description of Artificial Sequence: Synthetic primer
  Description of Combined DNA/RNA Molecule: Synthetic primer
tggagagggagatcacgtaacactaacaacactccctaataccaacctgaaatg

SEQ ID NO: 4277 - DNA, 31 bp, Artificial Sequence
  Description of Artificial Sequence: Synthetic primer
  Description of Combined DNA/RNA Molecule: Synthetic primer
ttttttcgagttgtagattttttgtcgtagc

SEQ ID NO: 4278 - DNA, 33 bp, Artificial Sequence
  Description of Artificial Sequence: Synthetic primer
  Description of Combined DNA/RNA Molecule: Synthetic primer
ggtgtcgtggcccaaacccgcgaactaaccctg

SEQ ID NO: 4279 - DNA, 60 bp, Artificial Sequence
  Description of Artificial Sequence: Synthetic oligonucleotide
  Description of Combined DNA/RNA Molecule: Synthetic oligonucleotide
tctcgggaccacaatacgaaccgagttgtagattttttgtcgtagttttttcatcgttta

SEQ ID NO: 4280 - DNA, 62 bp, Artificial Sequence
  Description of Artificial Sequence: Synthetic oligonucleotide
gttcggatgtagttttttcgcgtcgagtatatttattgtagggttacgctaagctggtgcca

SEQ ID NO: 4281 - DNA, 32 bp, Artificial Sequence
  Description of Artificial Sequence: Synthetic probe
aatttcatcgttcggatgtagttttttcgcgt

SEQ ID NO: 4282 - DNA, 21 bp, Artificial Sequence
  Description of Artificial Sequence: Synthetic primer
tctcgggaccacaatacgaac

SEQ ID NO: 4283 - DNA, 20 bp, Artificial Sequence
  Description of Artificial Sequence: Synthetic primer
tggcaccagcttagcgtaac

SEQ ID NO: 4284 - DNA, 55 bp, Artificial Sequence
  Description of Artificial Sequence: Synthetic primer
  Description of Combined DNA/RNA Molecule: Synthetic primer
tggcaccagcttagcgtaaccgcgaactaaccctacaataaatatacttgacgca

SEQ ID NO: 4285 - DNA, 22 bp, Artificial Sequence
  Description of Artificial Sequence: Synthetic primer
  Description of Combined DNA/RNA Molecule: Synthetic primer
gtaggcgtcgttggtgcgtatc

SEQ ID NO: 4286 - DNA, 35 bp, Artificial Sequence
  Description of Artificial Sequence: Synthetic primer
  Description of Combined DNA/RNA Molecule: Synthetic primer
ggtgtcgtgggacgaaaaatctcccgatccuacct

SEQ ID NO: 4287 - DNA, 47 bp, Artificial Sequence
  Description of Artificial Sequence: Synthetic oligonucleotide
  Description of Combined DNA/RNA Molecule: Synthetic oligonucleotide
ttgctgtgcgcggtagaacggaggatatgggagtgacgtcgcggaag

SEQ ID NO: 4288 - DNA, 46 bp, Artificial Sequence
  Description of Artificial Sequence: Synthetic oligonucleotide
ggagagagcgggaagttagttcggaggttacgctaagctggtgcca

SEQ ID NO: 4289 - DNA, 21 bp, Artificial Sequence
  Description of Artificial Sequence: Synthetic probe
aaacgtcgcggagagagcggg

SEQ ID NO: 4290 - DNA, 19 bp, Artificial Sequence
  Description of Artificial Sequence: Synthetic primer
ttgctgtgcgcggtagaac

SEQ ID NO: 4291 - DNA, 20 bp, Artificial Sequence
  Description of Artificial Sequence: Synthetic primer
tggcaccagcttagcgtaac

SEQ ID NO: 4292 - DNA, 43 bp, Artificial Sequence
  Description of Artificial Sequence: Synthetic primer
  Description of Combined DNA/RNA Molecule: Synthetic primer
tggcaccagcttagcgtaacccgatcctacccgctctgaactg

SEQ ID NO: 4293 - DNA, 23 bp, Artificial Sequence
  Description of Artificial Sequence: Synthetic primer
  Description of Combined DNA/RNA Molecule: Synthetic primer
ggcgcgttttttcgagtcgtttc

SEQ ID NO: 4294 - DNA, 36 bp, Artificial Sequence
  Description of Artificial Sequence: Synthetic primer
  Description of Combined DNA/RNA Molecule: Synthetic primer
ggtgtcgtggctaaaataacccgcaccaaacaaacc

SEQ ID NO: 4295 - DNA, 49 bp, Artificial Sequence
  Description of Artificial Sequence: Synthetic oligonucleotide
  Description of Combined DNA/RNA Molecule: Synthetic oligonucleotide
tctcgattacgctccgcacgtcgttttagtggttagttgtttgcggcac

SEQ ID NO: 4296 - DNA, 53 bp, Artificial Sequence
  Description of Artificial Sequence: Synthetic oligonucleotide
ggcgttttgttatcggtggatttgcgtgtaggtgtgtagcttagacatggcca

SEQ ID NO: 4297 - DNA, 29 bp, Artificial Sequence
  Description of Artificial Sequence: Synthetic probe
aatttgtgcggcgttttgttatcggtgga

SEQ ID NO: 4298 - DNA, 19 bp, Artificial Sequence
  Description of Artificial Sequence: Synthetic primer
tctcgattacgctccgcac

SEQ ID NO: 4299 - DNA, 22 bp, Artificial Sequence
  Description of Artificial Sequence: Synthetic primer
tggccatgtctaagctacacac

SEQ ID NO: 4300 - DNA, 49 bp, Artificial Sequence
  Description of Artificial Sequence: Synthetic primer
  Description of Combined DNA/RNA Molecule: Synthetic primer
tggccatgtctaagctacacaccccgcaccaaacaaactacatgcaaac

SEQ ID NO: 4301 - DNA, 28 bp, Artificial Sequence
  Description of Artificial Sequence: Synthetic primer
  Description of Combined DNA/RNA Molecule: Synthetic primer
cggtgaggtttttttacgttatcggtga

SEQ ID NO: 4302 - DNA, 39 bp, Artificial Sequence
  Description of Artificial Sequence: Synthetic primer
  Description of Combined DNA/RNA Molecule: Synthetic primer
ggtgtcgtggcgtaaatccactaacgacaaaaccccgca

SEQ ID NO: 4303 - DNA, 53 bp, Artificial Sequence
  Description of Artificial Sequence: Synthetic oligonucleotide
  Description of Combined DNA/RNA Molecule: Synthetic oligonucleotide
tcacagagacttgccgatcacggtttttttacgttatcggtggttagcgcgcc

SEQ ID NO: 4304 - DNA, 58 bp, Artificial Sequence
  Description of Artificial Sequence: Synthetic oligonucleotide
gcgtttttgcgagtcgttttagtggttagttgtttggtgtgtagcttagacatggcca

SEQ ID NO: 4305 - DNA, 33 bp, Artificial Sequence
  Description of Artificial Sequence: Synthetic probe
aaggttagcgcgtttttgcgagtcgttttagtg

SEQ ID NO: 4306 - DNA, 21 bp, Artificial Sequence
  Description of Artificial Sequence: Synthetic primer
tcacagagacttgccgatcac

SEQ ID NO: 4307 - DNA, 22 bp, Artificial Sequence
  Description of Artificial Sequence: Synthetic primer
tggccatgtctaagctacacac

SEQ ID NO: 4308 - DNA, 48 bp, Artificial Sequence
  Description of Artificial Sequence: Synthetic primer
  Description of Combined DNA/RNA Molecule: Synthetic primer
tggccatgtctaagctacacaccactaacgacaaaaccccgtgcaaat

SEQ ID NO: 4309 - DNA, 33 bp, Artificial Sequence
  Description of Artificial Sequence: Synthetic primer
  Description of Combined DNA/RNA Molecule: Synthetic primer
gtttttttttatggtaattgtttacgtcgtaga

SEQ ID NO: 4310 - DNA, 37 bp, Artificial Sequence
  Description of Artificial Sequence: Synthetic primer
  Description of Combined DNA/RNA Molecule: Synthetic primer
ggtgtcgtggcgttttccaccaaattttacgacccgg

SEQ ID NO: 4311 - DNA, 57 bp, Artificial Sequence
  Description of Artificial Sequence: Synthetic oligonucleotide
  Description of Combined DNA/RNA Molecule: Synthetic oligonucleotide
tcacagagacttgccgatcaccgtaggttggagttgtttattatcggagctcgtaga

SEQ ID NO: 4312 - DNA, 60 bp, Artificial Sequence
  Description of Artificial Sequence: Synthetic oligonucleotide
gtaagtagtatgggtgttggataaatagcgtgatcggggtgtgtagcttagacatggcca

SEQ ID NO: 4313 - DNA, 39 bp, Artificial Sequence
  Description of Artificial Sequence: Synthetic probe
aaggagctcgtaagtagtatgggtgttggataaatagcg

SEQ ID NO: 4314 - DNA, 21 bp, Artificial Sequence
  Description of Artificial Sequence: Synthetic primer
tcacagagacttgccgatcac

SEQ ID NO: 4315 - DNA, 22 bp, Artificial Sequence
  Description of Artificial Sequence: Synthetic primer
tggccatgtctaagctacacac

SEQ ID NO: 4316 - DNA, 53 bp, Artificial Sequence
  Description of Artificial Sequence: Synthetic primer
  Description of Combined DNA/RNA Molecule: Synthetic primer
tggccatgtctaagctacacaccgttttccaccaaattttacgacctgatcat

SEQ ID NO: 4317 - DNA, 27 bp, Artificial Sequence
  Description of Artificial Sequence: Synthetic primer
  Description of Combined DNA/RNA Molecule: Synthetic primer
gggtggaggtatttattatcgcgataa

SEQ ID NO: 4318 - DNA, 38 bp, Artificial Sequence
  Description of Artificial Sequence: Synthetic primer
  Description of Combined DNA/RNA Molecule: Synthetic primer
ggtgtcgtggtaatcctactcgctcctcgtaacctcct

SEQ ID NO: 4319 - DNA, 56 bp, Artificial Sequence
  Description of Artificial Sequence: Synthetic oligonucleotide
  Description of Combined DNA/RNA Molecule: Synthetic oligonucleotide
ttcgtccctgcacgctaacgtgagggtatttattatcgataggttgtaatcgtaag

SEQ ID NO: 4320 - DNA, 48 bp, Artificial Sequence
  Description of Artificial Sequence: Synthetic oligonucleotide
gtagaggaaggaggagtcgaaggcgttcgttccatcaccgttaggcca

SEQ ID NO: 4321 - DNA, 33 bp, Artificial Sequence
  Description of Artificial Sequence: Synthetic probe
aatgtaatcgtagaggaaggaggagtcgaaggc

SEQ ID NO: 4322 - DNA, 19 bp, Artificial Sequence
  Description of Artificial Sequence: Synthetic primer
ttcgtccctgcacgctaac

SEQ ID NO: 4323 - DNA, 20 bp, Artificial Sequence
  Description of Artificial Sequence: Synthetic primer
tggcctaacggtgatggaac

SEQ ID NO: 4324 - DNA, 44 bp, Artificial Sequence
  Description of Artificial Sequence: Synthetic primer
  Description of Combined DNA/RNA Molecule: Synthetic primer
tggcctaacggtgatggaaccctcgtaacctccctcgtgaacgt

SEQ ID NO: 4325 - DNA, 26 bp, Artificial Sequence
  Description of Artificial Sequence: Synthetic primer
  Description of Combined DNA/RNA Molecule: Synthetic primer
gaggcgattttaatttcgttcgtttc

SEQ ID NO: 4326 - DNA, 37 bp, Artificial Sequence
  Description of Artificial Sequence: Synthetic primer
  Description of Combined DNA/RNA Molecule: Synthetic primer
ggtgtcgtggcaaactacaaaatccgcgtcacctccg

SEQ ID NO: 4327 - DNA, 56 bp, Artificial Sequence
  Description of Artificial Sequence: Synthetic oligonucleotide
  Description of Combined DNA/RNA Molecule: Synthetic oligonucleotide
tgatgctggcaaaccctagaacggcgattttaatttcgttcgttttcgctcgttcc

SEQ ID NO: 4328 - DNA, 62 bp, Artificial Sequence
  Description of Artificial Sequence: Synthetic oligonucleotide
gtttttgtttgtttttgcgttttatttagttttagcgttttggttccatcaccgttaggcca

SEQ ID NO: 4329 - DNA, 35 bp, Artificial Sequence
  Description of Artificial Sequence: Synthetic probe
aattcgctcgtttttgtttgtttttgcgttttatt

SEQ ID NO: 4330 - DNA, 22 bp, Artificial Sequence
  Description of Artificial Sequence: Synthetic primer
tgatgctggcaaaccctagaac

SEQ ID NO: 4331 - DNA, 20 bp, Artificial Sequence
  Description of Artificial Sequence: Synthetic primer
tggcctaacggtgatggaac

SEQ ID NO: 4332 - DNA, 46 bp, Artificial Sequence
  Description of Artificial Sequence: Synthetic primer
  Description of Combined DNA/RNA Molecule: Synthetic primer
tggcctaacggtgatggaacatccgcgtcacctccaaaatgctaag

SEQ ID NO: 4333 - DNA, 26 bp, Artificial Sequence
  Description of Artificial Sequence: Synthetic primer
  Description of Combined DNA/RNA Molecule: Synthetic primer
ggttttggttttgttgtggtcggcgc

SEQ ID NO: 4334 - DNA, 42 bp, Artificial Sequence
  Description of Artificial Sequence: Synthetic primer
  Description of Combined DNA/RNA Molecule: Synthetic primer
ggtgtcgtggcaaaaaacaacgaatataaaacgacacuactc

SEQ ID NO: 4335 - DNA, 48 bp, Artificial Sequence
  Description of Artificial Sequence: Synthetic oligonucleotide
  Description of Combined DNA/RNA Molecule: Synthetic oligonucleotide
tgatgctggcaaaccctagaacggttttgttgtggtcggcatcgtgct

SEQ ID NO: 4336 - DNA, 61 bp, Artificial Sequence
  Description of Artificial Sequence: Synthetic oligonucleotide
gtgtcgtttttttttttgtcgtttcgtattttttttgtacggttccatcaccgttaggcca

SEQ ID NO: 4337 - DNA, 35 bp, Artificial Sequence
  Description of Artificial Sequence: Synthetic probe
aacggcatcgtgtcgtttttttttttgtcgtttcg

SEQ ID NO: 4338 - DNA, 22 bp, Artificial Sequence
  Description of Artificial Sequence: Synthetic primer
tgatgctggcaaaccctagaac

SEQ ID NO: 4339 - DNA, 20 bp, Artificial Sequence
  Description of Artificial Sequence: Synthetic primer
tggcctaacggtgatggaac

SEQ ID NO: 4340 - DNA, 64 bp, Artificial Sequence
  Description of Artificial Sequence: Synthetic primer
  Description of Combined DNA/RNA Molecule: Synthetic primer
tggcctaacggtgatggaacaaaacaacgaatataaaacgacactacttattaactatguacag

SEQ ID NO: 4341 - DNA, 42 bp, Artificial Sequence
  Description of Artificial Sequence: Synthetic primer
  Description of Combined DNA/RNA Molecule: Synthetic primer
tttaatttgttagtttttttatttagttatagttttcggagc

SEQ ID NO: 4342 - DNA, 34 bp, Artificial Sequence
  Description of Artificial Sequence: Synthetic primer
  Description of Combined DNA/RNA Molecule: Synthetic primer
ggtgtcgtggcaccgccaaataaaccgaaacgat

SEQ ID NO: 4343 - DNA, 64 bp, Artificial Sequence
  Description of Artificial Sequence: Synthetic oligonucleotide
  Description of Combined DNA/RNA Molecule: Synthetic oligonucleotide
ttttcggcatccgcttccaaatttgttagtttttttatttagttatagttttcggaatcgttac

SEQ ID NO: 4344 - DNA, 66 bp, Artificial Sequence
  Description of Artificial Sequence: Synthetic oligonucleotide
gttgtatatttatttgttcggtcgatttatttgtatttgtcgtcgtggttaacagaggacaggcca

SEQ ID NO: 4345 - DNA, 44 bp, Artificial Sequence
  Description of Artificial Sequence: Synthetic probe
aacggaatcgttgtatatttatttgttcggtcgatttatttgta

SEQ ID NO: 4346 - DNA, 19 bp, Artificial Sequence
  Description of Artificial Sequence: Synthetic primer
ttttcggcatccgcttcca

SEQ ID NO: 4347 - DNA, 21 bp, Artificial Sequence
  Description of Artificial Sequence: Synthetic primer
tggcctgtcctctgttaacca

SEQ ID NO: 4348 - DNA, 49 bp, Artificial Sequence
  Description of Artificial Sequence: Synthetic primer
  Description of Combined DNA/RNA Molecule: Synthetic primer
tggcctgtcctctgttaaccaccgccaaataaaccgaaacgatgacaag

SEQ ID NO: 4349 - DNA, 27 bp, Artificial Sequence
  Description of Artificial Sequence: Synthetic primer
  Description of Combined DNA/RNA Molecule: Synthetic primer
ggttgtgcgtttgttgttattcgggag

SEQ ID NO: 4350 - DNA, 41 bp, Artificial Sequence
  Description of Artificial Sequence: Synthetic primer
  Description of Combined DNA/RNA Molecule: Synthetic primer
ggtgtcgtggtaaaaaaacctttaaatcgttaacgcutttg

SEQ ID NO: 4351 - DNA, 57 bp, Artificial Sequence
  Description of Artificial Sequence: Synthetic oligonucleotide
  Description of Combined DNA/RNA Molecule: Synthetic oligonucleotide
tccgggtatacactgtcccagtttgttgttattcgaggagttggttaaacacgcgac

SEQ ID NO: 4352 - DNA, 45 bp, Artificial Sequence
  Description of Artificial Sequence: Synthetic oligonucleotide
gcggtgtcggagggtattaaggcgtggttaacagaggacaggcca

SEQ ID NO: 4353 - DNA, 25 bp, Artificial Sequence
  Description of Artificial Sequence: Synthetic probe
aataaacacgcggtgtcggagggta

SEQ ID NO: 4354 - DNA, 20 bp, Artificial Sequence
  Description of Artificial Sequence: Synthetic primer
tccgggtatacactgtccca

SEQ ID NO: 4355 - DNA, 21 bp, Artificial Sequence
  Description of Artificial Sequence: Synthetic primer
tggcctgtcctctgttaacca

SEQ ID NO: 4356 - DNA, 69 bp, Artificial Sequence
  Description of Artificial Sequence: Synthetic primer
  Description of Combined DNA/RNA Molecule: Synthetic primer
tggcctgtcctctgttaaccacccaaataactaatttacttaaaactaatatacttaataactgccttg

SEQ ID NO: 4357 - DNA, 20 bp, Artificial Sequence
  Description of Artificial Sequence: Synthetic primer
  Description of Combined DNA/RNA Molecule: Synthetic primer
ggtgggtggcggttcgggta

SEQ ID NO: 4358 - DNA, 44 bp, Artificial Sequence
  Description of Artificial Sequence: Synthetic primer
  Description of Combined DNA/RNA Molecule: Synthetic primer
ggtgtcgtggaacatacataataaaaaaacctcgtcctcutact

SEQ ID NO: 4359 - DNA, 43 bp, Artificial Sequence
  Description of Artificial Sequence: Synthetic oligonucleotide
  Description of Combined DNA/RNA Molecule: Synthetic oligonucleotide
tgcgactctattcacgtccaaggcggtggtttgggcgcgcgac

SEQ ID NO: 4360 - DNA, 52 bp, Artificial Sequence
  Description of Artificial Sequence: Synthetic oligonucleotide
gcggtgggcggtattatttaggtttgttgcgttgctatttggtgtaccgcca

SEQ ID NO: 4361 - DNA, 17 bp, Artificial Sequence
  Description of Artificial Sequence: Synthetic probe
aatgggcgcgcggtggg

SEQ ID NO: 4362 - DNA, 21 bp, Artificial Sequence
  Description of Artificial Sequence: Synthetic primer
tgcgactctattcacgtccaa

SEQ ID NO: 4363 - DNA, 21 bp, Artificial Sequence
  Description of Artificial Sequence: Synthetic primer
tggcggtacaccaaatagcaa

SEQ ID NO: 4364 - DNA, 56 bp, Artificial Sequence
  Description of Artificial Sequence: Synthetic primer
  Description of Combined DNA/RNA Molecule: Synthetic primer
tggcggtacaccaaatagcaaccaacatcgcaacaaacctaaataatactgcccat

SEQ ID NO: 4365 - DNA, 31 bp, Artificial Sequence
  Description of Artificial Sequence: Synthetic primer
  Description of Combined DNA/RNA Molecule: Synthetic primer
ggcgagatttagtatgtttatatcgcgagta

SEQ ID NO: 4366 - DNA, 34 bp, Artificial Sequence
  Description of Artificial Sequence: Synthetic primer
  Description of Combined DNA/RNA Molecule: Synthetic primer
ggtgtcgtggcgaacgaaaccgcgatttcutcca

SEQ ID NO: 4367 - DNA, 46 bp, Artificial Sequence
  Description of Artificial Sequence: Synthetic oligonucleotide
  Description of Combined DNA/RNA Molecule: Synthetic oligonucleotide
ttgtgcagagcgaacaacaagagtgggtgggcggtgttcacgtaaa

SEQ ID NO: 4368 - DNA, 45 bp, Artificial Sequence
  Description of Artificial Sequence: Synthetic oligonucleotide
gtaggcggagaagaacgggcgtagttgctatttggtgtaccgcca

SEQ ID NO: 4369 - DNA, 27 bp, Artificial Sequence
  Description of Artificial Sequence: Synthetic probe
tttgttcacgtaggcggagaagaacgg

SEQ ID NO: 4370 - DNA, 20 bp, Artificial Sequence
  Description of Artificial Sequence: Synthetic primer
ttgtgcagagcgaacaacaa

SEQ ID NO: 4371 - DNA, 21 bp, Artificial Sequence
  Description of Artificial Sequence: Synthetic primer
tggcggtacaccaaatagcaa

SEQ ID NO: 4372 - DNA, 48 bp, Artificial Sequence
  Description of Artificial Sequence: Synthetic primer
  Description of Combined DNA/RNA Molecule: Synthetic primer
tggcggtacaccaaatagcaacgatttcttccgcatcgctatgcccgc

SEQ ID NO: 4373 - DNA, 29 bp, Artificial Sequence
  Description of Artificial Sequence: Synthetic primer
  Description of Combined DNA/RNA Molecule: Synthetic primer
gggtattttgggtagagttagagcggcga

SEQ ID NO: 4374 - DNA, 31 bp, Artificial Sequence
  Description of Artificial Sequence: Synthetic primer
  Description of Combined DNA/RNA Molecule: Synthetic primer
ggtgtcgtggcccgaacgacgaacgcuccca

SEQ ID NO: 4375 - DNA, 47 bp, Artificial Sequence
  Description of Artificial Sequence: Synthetic oligonucleotide
  Description of Combined DNA/RNA Molecule: Synthetic oligonucleotide
tccaaacgattaggagcgtcaagagttagagcggcgggaatcggtcc

SEQ ID NO: 4376 - DNA, 44 bp, Artificial Sequence
  Description of Artificial Sequence: Synthetic oligonucleotide
ggttttgggcgcgttgtttcgggttggacagaggtatacgccca

SEQ ID NO: 4377 - DNA, 25 bp, Artificial Sequence
  Description of Artificial Sequence: Synthetic probe
ttgggaatcggttttgggcgcgttg

SEQ ID NO: 4378 - DNA, 22 bp, Artificial Sequence
  Description of Artificial Sequence: Synthetic primer
tccaaacgattaggagcgtcaa

SEQ ID NO: 4379 - DNA, 21 bp, Artificial Sequence
  Description of Artificial Sequence: Synthetic primer
tgggcgtatacctctgtccaa

SEQ ID NO: 4380 - DNA, 45 bp, Artificial Sequence
  Description of Artificial Sequence: Synthetic primer
  Description of Combined DNA/RNA Molecule: Synthetic primer
tgggcgtatacctctgtccaacgaacgacgaacgctcctgaaacg

SEQ ID NO: 4381 - DNA, 21 bp, Artificial Sequence
  Description of Artificial Sequence: Synthetic primer
  Description of Combined DNA/RNA Molecule: Synthetic primer
gtagggttggaggagcggcgg

SEQ ID NO: 4382 - DNA, 34 bp, Artificial Sequence
  Description of Artificial Sequence: Synthetic primer
  Description of Combined DNA/RNA Molecule: Synthetic primer
ggtgtcgtggcgactattcccacaaccgccgcct

SEQ ID NO: 4383 - DNA, 46 bp, Artificial Sequence
  Description of Artificial Sequence: Synthetic oligonucleotide
  Description of Combined DNA/RNA Molecule: Synthetic oligonucleotide
tccaaacgattaggagcgtcaattggaggagcggcgatctcgggcg

SEQ ID NO: 4384 - DNA, 49 bp, Artificial Sequence
  Description of Artificial Sequence: Synthetic oligonucleotide
gggaagagcggagtcgtagataatggacttggacagaggtatacgccca

SEQ ID NO: 4385 - DNA, 24 bp, Artificial Sequence
  Description of Artificial Sequence: Synthetic probe
ttcgatctcgggaagagcggagtc

SEQ ID NO: 4386 - DNA, 22 bp, Artificial Sequence
  Description of Artificial Sequence: Synthetic primer
tccaaacgattaggagcgtcaa

SEQ ID NO: 4387 - DNA, 21 bp, Artificial Sequence
  Description of Artificial Sequence: Synthetic primer
tgggcgtatacctctgtccaa

SEQ ID NO: 4388 - DNA, 42 bp, Artificial Sequence
  Description of Artificial Sequence: Synthetic primer
  Description of Combined DNA/RNA Molecule: Synthetic primer
tgggcgtatacctctgtccaagccgcccctcctactgccgca

SEQ ID NO: 4389 - DNA, 26 bp, Artificial Sequence
  Description of Artificial Sequence: Synthetic primer
  Description of Combined DNA/RNA Molecule: Synthetic primer
gtttttcgtggatttgttcgcgtcgc

SEQ ID NO: 4390 - DNA, 30 bp, Artificial Sequence
  Description of Artificial Sequence: Synthetic primer
  Description of Combined DNA/RNA Molecule: Synthetic primer
ggtgtcgtggcgcgcgactcgaaacgaaag

SEQ ID NO: 4391 - DNA, 47 bp, Artificial Sequence
  Description of Artificial Sequence: Synthetic oligonucleotide
  Description of Combined DNA/RNA Molecule: Synthetic oligonucleotide
ttgcagcgggtcacaacaaggatttgttcgcgtcgttcgctcggtcc

SEQ ID NO: 4392 - DNA, 66 bp, Artificial Sequence
  Description of Artificial Sequence: Synthetic oligonucleotide
ggtttttagttgttaagtagtcgtttgtttcgttcgatttttttcttggacagaggtatacgccca

SEQ ID NO: 4393 - DNA, 41 bp, Artificial Sequence
  Description of Artificial Sequence: Synthetic probe
ttttcgctcggtttttagttgttaagtagtcgtttgtttcg

SEQ ID NO: 4394 - DNA, 19 bp, Artificial Sequence
  Description of Artificial Sequence: Synthetic primer
ttgcagcgggtcacaacaa

SEQ ID NO: 4395 - DNA, 21 bp, Artificial Sequence
  Description of Artificial Sequence: Synthetic primer
tgggcgtatacctctgtccaa

SEQ ID NO: 4396 - DNA, 51 bp, Artificial Sequence
  Description of Artificial Sequence: Synthetic primer
  Description of Combined DNA/RNA Molecule: Synthetic primer
tgggcgtatacctctgtccaagcgcgactcgaaacgaaaaaaattgaacgg

SEQ ID NO: 4397 - DNA, 38 bp, Artificial Sequence
  Description of Artificial Sequence: Synthetic primer
  Description of Combined DNA/RNA Molecule: Synthetic primer
ggagaagtttattgtagtgttattttagttttcgaaga

SEQ ID NO: 4398 - DNA, 34 bp, Artificial Sequence
  Description of Artificial Sequence: Synthetic primer
  Description of Combined DNA/RNA Molecule: Synthetic primer
ggtgtcgtggactaacatacccgcccaaacgcgt

SEQ ID NO: 4399 - DNA, 52 bp, Artificial Sequence
  Description of Artificial Sequence: Synthetic oligonucleotide
  Description of Combined DNA/RNA Molecule: Synthetic oligonucleotide
ttcgtgcgtcgtgtagcaatgttattttagttttcgaaggcgtgcgcgtacg

SEQ ID NO: 4400 - DNA, 69 bp, Artificial Sequence
  Description of Artificial Sequence: Synthetic oligonucleotide
gtatatattttcgtatatatatattcgtatatatattttcgggcgcgcgttgcccattttctgcaccca

SEQ ID NO: 4401 - DNA, 52 bp, Artificial Sequence
  Description of Artificial Sequence: Synthetic probe
ttcgtgcgcgtatatattttcgtatatatatattcgtatatatattttcggg

SEQ ID NO: 4402 - DNA, 19 bp, Artificial Sequence
  Description of Artificial Sequence: Synthetic primer
ttcgtgcgtcgtgtagcaa

SEQ ID NO: 4403 - DNA, 20 bp, Artificial Sequence
  Description of Artificial Sequence: Synthetic primer
tgggtgcagaaaatgggcaa

SEQ ID NO: 4404 - DNA, 40 bp, Artificial Sequence
  Description of Artificial Sequence: Synthetic primer
  Description of Combined DNA/RNA Molecule: Synthetic primer
tgggtgcagaaaatgggcaaccgcccaaacgcgtgcccgg

SEQ ID NO: 4405 - DNA, 33 bp, Artificial Sequence
  Description of Artificial Sequence: Synthetic primer
  Description of Combined DNA/RNA Molecule: Synthetic primer
tgtttcgtttttttcgtaaagtttattcgaatc

SEQ ID NO: 4406 - DNA, 38 bp, Artificial Sequence
  Description of Artificial Sequence: Synthetic primer
  Description of Combined DNA/RNA Molecule: Synthetic primer
ggtgtcgtggcgatccttaccccacctaataacutaca

SEQ ID NO: 4407 - DNA, 63 bp, Artificial Sequence
  Description of Artificial Sequence: Synthetic oligonucleotide
  Description of Combined DNA/RNA Molecule: Synthetic oligonucleotide
tcccttagagagaacgcccacgtttttttcgtaaagtttattcgaattttgtagtcacgttcc

SEQ ID NO: 4408 - DNA, 51 bp, Artificial Sequence
  Description of Artificial Sequence: Synthetic oligonucleotide
gttttggttgtggagaatgcggtttttcgtggtgacgtacgagtgttctta

SEQ ID NO: 4409 - DNA, 30 bp, Artificial Sequence
  Description of Artificial Sequence: Synthetic probe
aatagtcacgttttggttgtggagaatgcg

SEQ ID NO: 4410 - DNA, 20 bp, Artificial Sequence
  Description of Artificial Sequence: Synthetic primer
tcccttagagagaacgccca

SEQ ID NO: 4411 - DNA, 22 bp, Artificial Sequence
  Description of Artificial Sequence: Synthetic primer
taagaacactcgtacgtcacca

SEQ ID NO: 4412 - DNA, 62 bp, Artificial Sequence
  Description of Artificial Sequence: Synthetic primer
  Description of Combined DNA/RNA Molecule: Synthetic primer
taagaacactcgtacgtcaccaccttaccccacctaataacttacgaaaataatatgaaaag

SEQ ID NO: 4413 - DNA, 31 bp, Artificial Sequence
  Description of Artificial Sequence: Synthetic primer
  Description of Combined DNA/RNA Molecule: Synthetic primer
cgttttaagtttatgagtagaagggcgttgt

SEQ ID NO: 4414 - DNA, 35 bp, Artificial Sequence
  Description of Artificial Sequence: Synthetic primer
  Description of Combined DNA/RNA Molecule: Synthetic primer
ggtgtcgtggaaacgaaacaacccgcaaacucctg

SEQ ID NO: 4415 - DNA, 41 bp, Artificial Sequence
  Description of Artificial Sequence: Synthetic oligonucleotide
  Description of Combined DNA/RNA Molecule: Synthetic oligonucleotide
tctcataccagacgcggtaacggcgttgcggcgaacgttaa

SEQ ID NO: 4416 - DNA, 70 bp, Artificial Sequence
  Description of Artificial Sequence: Synthetic oligonucleotide
gttggtagttataggttgaatgataaagagttttcgttagtattatttttagttcgtgtcgctgtgctta

SEQ ID NO: 4417 - DNA, 40 bp, Artificial Sequence
  Description of Artificial Sequence: Synthetic probe
ttggcgaacgttggtagttataggttgaatgataaagagt

SEQ ID NO: 4418 - DNA, 21 bp, Artificial Sequence
  Description of Artificial Sequence: Synthetic primer
tctcataccagacgcggtaac

SEQ ID NO: 4419 - DNA, 19 bp, Artificial Sequence
  Description of Artificial Sequence: Synthetic primer
taagcacagcgacacgaac

SEQ ID NO: 4420 - DNA, 55 bp, Artificial Sequence
  Description of Artificial Sequence: Synthetic primer
  Description of Combined DNA/RNA Molecule: Synthetic primer
taagcacagcgacacgaacaacccgcaaactcctaaaaataatactaatgaaaat

SEQ ID NO: 4421 - DNA, 23 bp, Artificial Sequence
  Description of Artificial Sequence: Synthetic primer
  Description of Combined DNA/RNA Molecule: Synthetic primer
gggtgagttttgaggagcgggac

SEQ ID NO: 4422 - DNA, 30 bp, Artificial Sequence
  Description of Artificial Sequence: Synthetic primer
  Description of Combined DNA/RNA Molecule: Synthetic primer
ggtgtcgtggcgcgcgcgaacgaaaaacgt

SEQ ID NO: 4423 - DNA, 42 bp, Artificial Sequence
  Description of Artificial Sequence: Synthetic oligonucleotide
  Description of Combined DNA/RNA Molecule: Synthetic oligonucleotide
ttttcggcggcagctaaacggagcgaggttggtgggcgttct

SEQ ID NO: 4424 - DNA, 48 bp, Artificial Sequence
  Description of Artificial Sequence: Synthetic oligonucleotide
gtttcgagtcgcgttttttttttcgcgcggttcgtgtcgctgtgctta

SEQ ID NO: 4425 - DNA, 22 bp, Artificial Sequence
  Description of Artificial Sequence: Synthetic probe
aaggtgggcgtttcgagtcgcg

SEQ ID NO: 4426 - DNA, 19 bp, Artificial Sequence
  Description of Artificial Sequence: Synthetic primer
ttttcggcggcagctaaac

SEQ ID NO: 4427 - DNA, 19 bp, Artificial Sequence
  Description of Artificial Sequence: Synthetic primer
taagcacagcgacacgaac

SEQ ID NO: 4428 - DNA, 42 bp, Artificial Sequence
  Description of Artificial Sequence: Synthetic primer
  Description of Combined DNA/RNA Molecule: Synthetic primer
taagcacagcgacacgaacgcgcgaacgaaaaacgtgcgaag

SEQ ID NO: 4429 - DNA, 33 bp, Artificial Sequence
  Description of Artificial Sequence: Synthetic primer
  Description of Combined DNA/RNA Molecule: Synthetic primer
gatttttaataaaacgtgcgtttttttcgataa

SEQ ID NO: 4430 - DNA, 38 bp, Artificial Sequence
  Description of Artificial Sequence: Synthetic primer
  Description of Combined DNA/RNA Molecule: Synthetic primer
ggtgtcgtggccttcctctaaaataaaacgccccctat

SEQ ID NO: 4431 - DNA, 55 bp, Artificial Sequence
  Description of Artificial Sequence: Synthetic oligonucleotide
  Description of Combined DNA/RNA Molecule: Synthetic oligonucleotide
tccggaccttcatcctccagcgtttttttcgatagtattttgtcggtctcggtcc

SEQ ID NO: 4432 - DNA, 53 bp, Artificial Sequence
  Description of Artificial Sequence: Synthetic oligonucleotide
ggttttttagcgcgaaacgttagcgttattgggtgggcaggaacacgatagta

SEQ ID NO: 4433 - DNA, 32 bp, Artificial Sequence
  Description of Artificial Sequence: Synthetic probe
aacggtctcggttttttagcgcgaaacgttag

SEQ ID NO: 4434 - DNA, 19 bp, Artificial Sequence
  Description of Artificial Sequence: Synthetic primer
tccggaccttcatcctcca

SEQ ID NO: 4435 - DNA, 20 bp, Artificial Sequence
  Description of Artificial Sequence: Synthetic primer
tactatcgtgttcctgccca

SEQ ID NO: 4436 - DNA, 50 bp, Artificial Sequence
  Description of Artificial Sequence: Synthetic primer
  Description of Combined DNA/RNA Molecule: Synthetic primer
tactatcgtgttcctgcccacgccccctactaaaacccaataatgctggt

SEQ ID NO: 4437 - DNA, 26 bp, Artificial Sequence
  Description of Artificial Sequence: Synthetic primer
  Description of Combined DNA/RNA Molecule: Synthetic primer
ggcggtagaaatatttggagcgatga

SEQ ID NO: 4438 - DNA, 30 bp, Artificial Sequence
  Description of Artificial Sequence: Synthetic primer
  Description of Combined DNA/RNA Molecule: Synthetic primer
ggtgtcgtggcctccctctcccgccuttct

SEQ ID NO: 4439 - DNA, 53 bp, Artificial Sequence
  Description of Artificial Sequence: Synthetic oligonucleotide
  Description of Combined DNA/RNA Molecule: Synthetic oligonucleotide
ttagccgccaaacgtaccacggtagaaatatttggagcgatggaactcggtcg

SEQ ID NO: 4440 - DNA, 52 bp, Artificial Sequence
  Description of Artificial Sequence: Synthetic oligonucleotide
ggttaggtgttgtagttttgatacggcggtggtgggcaggaacacgatagta

SEQ ID NO: 4441 - DNA, 35 bp, Artificial Sequence
  Description of Artificial Sequence: Synthetic probe
taggaactcggttaggtgttgtagttttgatacgg

SEQ ID NO: 4442 - DNA, 19 bp, Artificial Sequence
  Description of Artificial Sequence: Synthetic primer
ttagccgccaaacgtacca

SEQ ID NO: 4443 - DNA, 20 bp, Artificial Sequence
  Description of Artificial Sequence: Synthetic primer
tactatcgtgttcctgccca

SEQ ID NO: 4444 - DNA, 43 bp, Artificial Sequence
  Description of Artificial Sequence: Synthetic primer
  Description of Combined DNA/RNA Molecule: Synthetic primer
tactatcgtgttcctgcccacctccttccctcccactgccgtg

SEQ ID NO: 4445 - DNA, 34 bp, Artificial Sequence
  Description of Artificial Sequence: Synthetic primer
  Description of Combined DNA/RNA Molecule: Synthetic primer
gtaaatgtaataagttttttcgttgagtcgtagc

SEQ ID NO: 4446 - DNA, 37 bp, Artificial Sequence
  Description of Artificial Sequence: Synthetic primer
  Description of Combined DNA/RNA Molecule: Synthetic primer
ggtgtcgtggttaactctaaacatccgaccgcgaact

SEQ ID NO: 4447 - DNA, 60 bp, Artificial Sequence
  Description of Artificial Sequence: Synthetic oligonucleotide
  Description of Combined DNA/RNA Molecule: Synthetic oligonucleotide
tagcagctgaacaacccaacgttattttttgttttttgttttttcgttagggcacggtcc

SEQ ID NO: 4448 - DNA, 58 bp, Artificial Sequence
  Description of Artificial Sequence: Synthetic oligonucleotide
ggttttttttgcgttttaaattgagcggtaaagttagggttgtatggtcggcatgcta

SEQ ID NO: 4449 - DNA, 35 bp, Artificial Sequence
  Description of Artificial Sequence: Synthetic probe
aaagggcacggttttttttgcgttttaaattgagc

SEQ ID NO: 4450 - DNA, 20 bp, Artificial Sequence
  Description of Artificial Sequence: Synthetic primer
tagcagctgaacaacccaac

SEQ ID NO: 4451 - DNA, 20 bp, Artificial Sequence
  Description of Artificial Sequence: Synthetic primer
tagcatgccgaccatacaac

SEQ ID NO: 4452 - DNA, 48 bp, Artificial Sequence
  Description of Artificial Sequence: Synthetic primer
  Description of Combined DNA/RNA Molecule: Synthetic primer
tagcatgccgaccatacaacttaactctaaacatccgaccgtgaacct

SEQ ID NO: 4453 - DNA, 26 bp, Artificial Sequence
  Description of Artificial Sequence: Synthetic primer
  Description of Combined DNA/RNA Molecule: Synthetic primer
gggttttttaggaagcgaagcggata

SEQ ID NO: 4454 - DNA, 37 bp, Artificial Sequence
  Description of Artificial Sequence: Synthetic primer
  Description of Combined DNA/RNA Molecule: Synthetic primer
ggtgtcgtggctttataacgctacgacccgaaaacgg

SEQ ID NO: 4455 - DNA, 51 bp, Artificial Sequence
  Description of Artificial Sequence: Synthetic oligonucleotide
  Description of Combined DNA/RNA Molecule: Synthetic oligonucleotide
tctgcccttcgcttcgaacggaagcgaagcggatggaagattactcggtct

SEQ ID NO: 4456 - DNA, 53 bp, Artificial Sequence
  Description of Artificial Sequence: Synthetic oligonucleotide
ggttcggagtttcgggtttttattttcgtttcggttgtatggtcggcatgcta

SEQ ID NO: 4457 - DNA, 36 bp, Artificial Sequence
  Description of Artificial Sequence: Synthetic probe
ttattactcggttcggagtttcgggtttttattttc

SEQ ID NO: 4458 - DNA, 19 bp, Artificial Sequence
  Description of Artificial Sequence: Synthetic primer
tctgcccttcgcttcgaac

SEQ ID NO: 4459 - DNA, 20 bp, Artificial Sequence
  Description of Artificial Sequence: Synthetic primer
tagcatgccgaccatacaac

SEQ ID NO: 4460 - DNA, 51 bp, Artificial Sequence
  Description of Artificial Sequence: Synthetic primer
  Description of Combined DNA/RNA Molecule: Synthetic primer
tagcatgccgaccatacaacctttataacgctacgacccgaaaatgaaaca

SEQ ID NO: 4461 - DNA, 27 bp, Artificial Sequence
  Description of Artificial Sequence: Synthetic primer
  Description of Combined DNA/RNA Molecule: Synthetic primer
cgttcgttggaagtattttcgcgtttc

SEQ ID NO: 4462 - DNA, 31 bp, Artificial Sequence
  Description of Artificial Sequence: Synthetic primer
  Description of Combined DNA/RNA Molecule: Synthetic primer
ggtgtcgtggacacgacccgactcgactcag

SEQ ID NO: 4463 - DNA, 54 bp, Artificial Sequence
  Description of Artificial Sequence: Synthetic oligonucleotide
  Description of Combined DNA/RNA Molecule: Synthetic oligonucleotide
ttgcaaaccacccggacaacgttggaagtattttcgcgtttttttaagcgttga

SEQ ID NO: 4464 - DNA, 62 bp, Artificial Sequence
  Description of Artificial Sequence: Synthetic oligonucleotide
gttagattttatttcgttttattgcgtttcgtttcgtggttgttggtcagcatcgactccta

SEQ ID NO: 4465 - DNA, 43 bp, Artificial Sequence
  Description of Artificial Sequence: Synthetic probe
aatttaagcgttagattttatttcgttttattgcgtttcgttt

SEQ ID NO: 4466 - DNA, 19 bp, Artificial Sequence
  Description of Artificial Sequence: Synthetic primer
ttgcaaaccacccggacaa

SEQ ID NO: 4467 - DNA, 20 bp, Artificial Sequence
  Description of Artificial Sequence: Synthetic primer
taggagtcgatgctgaccaa

SEQ ID NO: 4468 - DNA, 45 bp, Artificial Sequence
  Description of Artificial Sequence: Synthetic primer
  Description of Combined DNA/RNA Molecule: Synthetic primer
taggagtcgatgctgaccaacccgactcgactcaaccatgaaaca

SEQ ID NO: 4469 - DNA, 30 bp, Artificial Sequence
  Description of Artificial Sequence: Synthetic primer
  Description of Combined DNA/RNA Molecule: Synthetic primer
gttaatgaaaagttggtattgggtcggaga

SEQ ID NO: 4470 - DNA, 32 bp, Artificial Sequence
  Description of Artificial Sequence: Synthetic primer
  Description of Combined DNA/RNA Molecule: Synthetic primer
ggtgtcgtggcgcccacatcccgaaaccaaac

SEQ ID NO: 4471 - DNA, 49 bp, Artificial Sequence
  Description of Artificial Sequence: Synthetic oligonucleotide
  Description of Combined DNA/RNA Molecule: Synthetic oligonucleotide
ttgcaaaccacccggacaagaaaagttggtattgggtcggaagcgttga

SEQ ID NO: 4472 - DNA, 57 bp, Artificial Sequence
  Description of Artificial Sequence: Synthetic oligonucleotide
gttagttaagtgggaggcggagtttttattatcggttttggtcagcatcgactccta

SEQ ID NO: 4473 - DNA, 27 bp, Artificial Sequence
  Description of Artificial Sequence: Synthetic probe
aacggaagcgttagttaagtgggaggc

SEQ ID NO: 4474 - DNA, 19 bp, Artificial Sequence
  Description of Artificial Sequence: Synthetic primer
ttgcaaaccacccggacaa

SEQ ID NO: 4475 - DNA, 20 bp, Artificial Sequence
  Description of Artificial Sequence: Synthetic primer
taggagtcgatgctgaccaa

SEQ ID NO: 4476 - DNA, 49 bp, Artificial Sequence
  Description of Artificial Sequence: Synthetic primer
  Description of Combined DNA/RNA Molecule: Synthetic primer
taggagtcgatgctgaccaaccgaaaccaaatccccattaactgataac

SEQ ID NO: 4477 - DNA, 23 bp, Artificial Sequence
  Description of Artificial Sequence: Synthetic primer
  Description of Combined DNA/RNA Molecule: Synthetic primer
gggacgattgtagagcgcggtgg

SEQ ID NO: 4478 - DNA, 35 bp, Artificial Sequence
  Description of Artificial Sequence: Synthetic primer
  Description of Combined DNA/RNA Molecule: Synthetic primer
ggtgtcgtgggaaatatcgaacccccgaaaaaaag

SEQ ID NO: 4479 - DNA, 50 bp, Artificial Sequence
  Description of Artificial Sequence: Synthetic oligonucleotide
  Description of Combined DNA/RNA Molecule: Synthetic oligonucleotide
taagacgtatgctagcgccaagattgtagagcgcggtgagtggacgcgac

SEQ ID NO: 4480 - DNA, 51 bp, Artificial Sequence
  Description of Artificial Sequence: Synthetic oligonucleotide
gcggttagagggagggatttaggcgttttagttggtcagcatcgactccta

SEQ ID NO: 4481 - DNA, 25 bp, Artificial Sequence
  Description of Artificial Sequence: Synthetic probe
aaagtggacgcggttagagggaggg

SEQ ID NO: 4482 - DNA, 21 bp, Artificial Sequence
  Description of Artificial Sequence: Synthetic primer
taagacgtatgctagcgccaa

SEQ ID NO: 4483 - DNA, 20 bp, Artificial Sequence
  Description of Artificial Sequence: Synthetic primer
taggagtcgatgctgaccaa

SEQ ID NO: 4484 - DNA, 57 bp, Artificial Sequence
  Description of Artificial Sequence: Synthetic primer
  Description of Combined DNA/RNA Molecule: Synthetic primer
taggagtcgatgctgaccaacccgaaaaaaaacaaaacgaaaacctaaaatgcctag

SEQ ID NO: 4485 - DNA, 28 bp, Artificial Sequence
  Description of Artificial Sequence: Synthetic primer
  Description of Combined DNA/RNA Molecule: Synthetic primer
ggttttttattcgtttcgagagcgttaa

SEQ ID NO: 4486 - DNA, 38 bp, Artificial Sequence
  Description of Artificial Sequence: Synthetic primer
  Description of Combined DNA/RNA Molecule: Synthetic primer
ggtgtcgtggaaaaacaaaacctaaaccgaaccctaag

SEQ ID NO: 4487 - DNA, 56 bp, Artificial Sequence
  Description of Artificial Sequence: Synthetic oligonucleotide
  Description of Combined DNA/RNA Molecule: Synthetic oligonucleotide
tacatgccatcccacgacagttaggtttttttttttttgattggtcgaatcgagct

SEQ ID NO: 4488 - DNA, 61 bp, Artificial Sequence
  Description of Artificial Sequence: Synthetic oligonucleotide
gagtcgttacgagttatgattggtttagggttaattatttcgtgtgtcggagcggttacta

SEQ ID NO: 4489 - DNA, 38 bp, Artificial Sequence
  Description of Artificial Sequence: Synthetic probe
tttcgaatcgagtcgttacgagttatgattggtttagg

SEQ ID NO: 4490 - DNA, 19 bp, Artificial Sequence
  Description of Artificial Sequence: Synthetic primer
tacatgccatcccacgaca

SEQ ID NO: 4491 - DNA, 19 bp, Artificial Sequence
  Description of Artificial Sequence: Synthetic primer
tagtaaccgctccgacaca

SEQ ID NO: 4492 - DNA, 57 bp, Artificial Sequence
  Description of Artificial Sequence: Synthetic primer
  Description of Combined DNA/RNA Molecule: Synthetic primer
tagtaaccgctccgacacacaaaacctaaaccgaaccctaaataaaaaaatgaaatg

SEQ ID NO: 4493 - DNA, 35 bp, Artificial Sequence
  Description of Artificial Sequence: Synthetic primer
  Description of Combined DNA/RNA Molecule: Synthetic primer
ttaattatttcgtttttttatttagggttcggttc

SEQ ID NO: 4494 - DNA, 36 bp, Artificial Sequence
  Description of Artificial Sequence: Synthetic primer
  Description of Combined DNA/RNA Molecule: Synthetic primer
ggtgtcgtggctcctcccgctaaaaaaaacaaaaag

SEQ ID NO: 4495 - DNA, 58 bp, Artificial Sequence
  Description of Artificial Sequence: Synthetic oligonucleotide
  Description of Combined DNA/RNA Molecule: Synthetic oligonucleotide
tccaaacaagctgatccgtacaggttttgttttttgatacgtagaggtttcgcgttcc

SEQ ID NO: 4496 - DNA, 57 bp, Artificial Sequence
  Description of Artificial Sequence: Synthetic oligonucleotide
gtttttatacgttttggttttcgttaggaggcgttttttgtgtcggagcggttacta

SEQ ID NO: 4497 - DNA, 39 bp, Artificial Sequence
  Description of Artificial Sequence: Synthetic probe
ttgtttcgcgtttttatacgttttggttttcgttaggag

SEQ ID NO: 4498 - DNA, 22 bp, Artificial Sequence
  Description of Artificial Sequence: Synthetic primer
tccaaacaagctgatccgtaca

SEQ ID NO: 4499 - DNA, 19 bp, Artificial Sequence
  Description of Artificial Sequence: Synthetic primer
tagtaaccgctccgacaca

SEQ ID NO: 4500 - DNA, 52 bp, Artificial Sequence
  Description of Artificial Sequence: Synthetic primer
  Description of Combined DNA/RNA Molecule: Synthetic primer
tagtaaccgctccgacacatcctcccgctaaaaaaaacaaaaaaatgcctct

SEQ ID NO: 4501 - DNA, 24 bp, Artificial Sequence
  Description of Artificial Sequence: Synthetic primer
  Description of Combined DNA/RNA Molecule: Synthetic primer
gggaattgtagtttcgcgcgcgat

SEQ ID NO: 4502 - DNA, 38 bp, Artificial Sequence
  Description of Artificial Sequence: Synthetic primer
  Description of Combined DNA/RNA Molecule: Synthetic primer
ggtgtcgtggctcgcttttcgattaccgttatcutttc

SEQ ID NO: 4503 - DNA, 47 bp, Artificial Sequence
  Description of Artificial Sequence: Synthetic oligonucleotide
  Description of Combined DNA/RNA Molecule: Synthetic oligonucleotide
tagggcgacagttaccacaagagcgcgatttagttttggtgcgcgcc

SEQ ID NO: 4504 - DNA, 66 bp, Artificial Sequence
  Description of Artificial Sequence: Synthetic oligonucleotide
gcgttttgttattttgtttattacgatcggatattttcgagttaagttgtgggtctcgctcgtata

SEQ ID NO: 4505 - DNA, 38 bp, Artificial Sequence
  Description of Artificial Sequence: Synthetic probe
aattggtgcgcgttttgttattttgtttattacgatcg

SEQ ID NO: 4506 - DNA, 20 bp, Artificial Sequence
  Description of Artificial Sequence: Synthetic primer
tagggcgacagttaccacaa

SEQ ID NO: 4507 - DNA, 20 bp, Artificial Sequence
  Description of Artificial Sequence: Synthetic primer
tatacgagcgagacccacaa

SEQ ID NO: 4508 - DNA, 57 bp, Artificial Sequence
  Description of Artificial Sequence: Synthetic primer
  Description of Combined DNA/RNA Molecule: Synthetic primer
tatacgagcgagacccacaattcgattaccgttatcttttttccttaacttgaaaac

SEQ ID NO: 4509 - DNA, 30 bp, Artificial Sequence
  Description of Artificial Sequence: Synthetic primer
  Description of Combined DNA/RNA Molecule: Synthetic primer
gactccataaaaaaataaccccaccgattt

SEQ ID NO: 4510 - DNA, 38 bp, Artificial Sequence
  Description of Artificial Sequence: Synthetic primer
  Description of Combined DNA/RNA Molecule: Synthetic primer
ggtgtcgtggcgaatacgattaacaaatcccgacgtat

SEQ ID NO: 4511 - DNA, 57 bp, Artificial Sequence
  Description of Artificial Sequence: Synthetic oligonucleotide
  Description of Combined DNA/RNA Molecule: Synthetic oligonucleotide
tccgactttagtgcgtcacaagggttatttttttatggagtcgattcgactcgttcg

SEQ ID NO: 4512 - DNA, 56 bp, Artificial Sequence
  Description of Artificial Sequence: Synthetic oligonucleotide
gtttaaagttgtttcgggaatcgtaggtttggttcgttgtgggtctcgctcgtata

SEQ ID NO: 4513 - DNA, 36 bp, Artificial Sequence
  Description of Artificial Sequence: Synthetic probe
cctcgactcgtttaaagttgtttcgggaatcgtagg

SEQ ID NO: 4514 - DNA, 21 bp, Artificial Sequence
  Description of Artificial Sequence: Synthetic primer
tccgactttagtgcgtcacaa

SEQ ID NO: 4515 - DNA, 20 bp, Artificial Sequence
  Description of Artificial Sequence: Synthetic primer
tatacgagcgagacccacaa

SEQ ID NO: 4516 - DNA, 49 bp, Artificial Sequence
  Description of Artificial Sequence: Synthetic primer
  Description of Combined DNA/RNA Molecule: Synthetic primer
tatacgagcgagacccacaagattaacaaatcccgacgtacgtgcctat

SEQ ID NO: 4517 - DNA, 24 bp, Artificial Sequence
  Description of Artificial Sequence: Synthetic primer
  Description of Combined DNA/RNA Molecule: Synthetic primer
gaggcgcggttttaattacgtagg

SEQ ID NO: 4518 - DNA, 45 bp, Artificial Sequence
  Description of Artificial Sequence: Synthetic primer
  Description of Combined DNA/RNA Molecule: Synthetic primer
ggtgtcgtggcctactttacatctaaataaaattaacgtccttac

SEQ ID NO: 4519 - DNA, 56 bp, Artificial Sequence
  Description of Artificial Sequence: Synthetic oligonucleotide
  Description of Combined DNA/RNA Molecule: Synthetic oligonucleotide
tcaaacaaaggcgaccacaaccggttttaattacgtagaggttggtacatcgatcc

SEQ ID NO: 4520 - DNA, 79 bp, Artificial Sequence
  Description of Artificial Sequence: Synthetic oligonucleotide
gattttttatattttattacgtttttattttcgttcgtgtatatatatttatataaggttgtcgcataggcagttcata

SEQ ID NO: 4521 - DNA, 54 bp, Artificial Sequence
  Description of Artificial Sequence: Synthetic probe
aagtacatcgattttttatattttattacgtttttattttcgttcgtgtatata

SEQ ID NO: 4522 - DNA, 21 bp, Artificial Sequence
  Description of Artificial Sequence: Synthetic primer
tcaaacaaaggcgaccacaac

SEQ ID NO: 4523 - DNA, 22 bp, Artificial Sequence
  Description of Artificial Sequence: Synthetic primer
tatgaactgcctatgcgacaac

SEQ ID NO: 4524 - DNA, 32 bp, Artificial Sequence
  Description of Artificial Sequence: Synthetic primer
  Description of Combined DNA/RNA Molecule: Synthetic primer
tggttaatggcgtttttttattaatgcgttag

SEQ ID NO: 4525 - DNA, 33 bp, Artificial Sequence
  Description of Artificial Sequence: Synthetic primer
  Description of Combined DNA/RNA Molecule: Synthetic primer
ggtgtcgtggcgccgaaacacgtacgaaatatt

SEQ ID NO: 4526 - DNA, 66 bp, Artificial Sequence
  Description of Artificial Sequence: Synthetic oligonucleotide
  Description of Combined DNA/RNA Molecule: Synthetic oligonucleotide
taaacaatgagacccgctgaacggttaatggcgtttttttattaatgcgttaattaatgtcgggat

SEQ ID NO: 4527 - DNA, 47 bp, Artificial Sequence
  Description of Artificial Sequence: Synthetic oligonucleotide
ggagcgacggattgcggaatagtaggttgtcgcataggcagttcata

SEQ ID NO: 4528 - DNA, 25 bp, Artificial Sequence
  Description of Artificial Sequence: Synthetic probe
cctaatgtcggagcgacggattgcg

SEQ ID NO: 4529 - DNA, 22 bp, Artificial Sequence
  Description of Artificial Sequence: Synthetic primer
taaacaatgagacccgctgaac

SEQ ID NO: 4530 - DNA, 22 bp, Artificial Sequence
  Description of Artificial Sequence: Synthetic primer
tatgaactgcctatgcgacaac

SEQ ID NO: 4531 - DNA, 45 bp, Artificial Sequence
  Description of Artificial Sequence: Synthetic primer
  Description of Combined DNA/RNA Molecule: Synthetic primer
tatgaactgcctatgcgacaacaacacgtacgaaatatctgaaat

What is claimed:

1. A method for identifying, in a sample, one or more parent nucleic acid molecules containing a target nucleotide sequence differing from nucleotide sequences of other parent nucleic acid molecules in the sample by one or more nucleotides, one or more copy numbers, one or more transcript sequences, and/or one or more methylated residues, said method comprising:
providing a sample containing one or more parent nucleic acid molecules potentially containing the target nucleotide sequence differing from the nucleotide sequences of other parent nucleic acid molecules by one or more nucleotides, one or more copy numbers, one or more transcript sequences, and/or one or more methylated residues;
providing one or more enzymes capable of digesting deoxyuracil (dU)-containing nucleic acid molecules;
providing one or more primary oligonucleotide primer sets, each primary oligonucleotide primer set comprising (a) a first primary oligonucleotide primer that comprises a nucleotide sequence that is complementary to a sequence in the parent nucleic acid molecule adjacent to the target nucleotide sequence and (b) a second primary oligonucleotide primer that comprises a nucleotide sequence that is complementary to a portion of an extension product formed from the first primary oligonucleotide primer;
blending the sample, the one or more first primary oligonucleotide primers of the primary oligonucleotide primer sets, the one or more enzymes capable of digesting deoxyuracil (dU)-containing nucleic acid molecules, a deoxynucleotide mix, and a DNA polymerase to form one or more polymerase extension reaction mixtures;
subjecting the one or more polymerase extension reaction mixtures to conditions suitable for digesting deoxyuracil (dU)-containing nucleic acid molecules present in the polymerase extension reaction mixtures and for carrying out one or more polymerase extension reaction cycles comprising a denaturation treatment, a hybridization treatment, and an extension treatment, thereby forming primary extension products comprising nucleotide sequences complementary to the target nucleotide sequence;
blending the one or more polymerase extension reaction mixtures comprising the primary extension products, the one or more second primary oligonucleotide primers of the primary oligonucleotide primer sets, the one or more enzymes capable of digesting deoxyuracil (dU)-containing nucleic acid molecules in the reaction mixtures, a deoxynucleotide mix including dUTP, and a DNA polymerase to form one or more first polymerase chain reaction mixtures;
subjecting the one or more first polymerase chain reaction mixtures to conditions suitable for digesting deoxyuracil (dU)-containing nucleic acid molecules present in the polymerase chain reaction mixtures and for carrying out one or more polymerase chain reaction cycles comprising a denaturation treatment, a hybridization treatment, and an extension treatment, thereby forming one or more first polymerase chain reaction products comprising the target nucleotide sequence or a complement thereof;
providing one or more oligonucleotide probe sets, each probe set comprising (a) a first oligonucleotide probe having a 5′ primer-specific portion and a 3′ target sequence-specific portion, and (b) a second oligonucleotide probe having a 5′ target sequence-specific portion and a 3′ primer-specific portion, wherein the first and second oligonucleotide probes of a probe set are configured to hybridize, in a base specific manner, on a complementary target nucleotide sequence of a secondary extension product;
blending the one or more first polymerase chain reaction products with a ligase, and the one or more oligonucleotide probe sets to form one or more ligation reaction mixtures;
subjecting the one or more ligation reaction mixtures to one or more ligation reaction cycles whereby the first and second oligonucleotide probes of the one or more oligonucleotide probe sets are ligated together, when hybridized to their complementary sequence, to form ligated product sequences in the ligation reaction mixtures wherein each ligated product sequence comprises the 5′ primer-specific portion, the target-specific portions, and the 3′ primer-specific portion;
providing one or more secondary oligonucleotide primer sets, each secondary oligonucleotide primer set comprising (a) a first secondary oligonucleotide primer comprising the same nucleotide sequence as the 5′ primer-specific portion of the ligated product sequence and (b) a second secondary oligonucleotide primer comprising a nucleotide sequence that is complementary to the 3′ primer-specific portion of the ligated product sequence;
blending the ligated product sequences, the one or more secondary oligonucleotide primer sets, the one or more enzymes capable of digesting deoxyuracil (dU)-containing nucleic acid molecules, a deoxynucleotide mix including dUTP, and a DNA polymerase to form one or more second polymerase chain reaction mixtures;
subjecting the one or more second polymerase chain reaction mixtures to conditions suitable for digesting deoxyuracil (dU)-containing nucleic acid molecules present in the second polymerase chain reaction mixtures and for carrying out one or more polymerase chain reaction cycles comprising a denaturation treatment, a hybridization treatment, and an extension treatment thereby forming one or more second polymerase chain reaction products; and
detecting and distinguishing the one or more second polymerase chain reaction products in the one or more second polymerase chain reaction mixtures to identify the presence of one or more parent nucleic acid molecules containing target nucleotide sequences differing from nucleotide sequences in other parent nucleic acid molecules in the sample by one or more nucleotides, one or more copy numbers, one or more transcript sequences, and/or one or more methylated residues.

2. A method for identifying, in a sample, one or more parent nucleic acid molecules containing a target nucleotide sequence differing from nucleotide sequences in other parent nucleic acid molecules in the sample by one or more nucleotides, one or more copy numbers, one or more transcript sequences, and/or one or more methylated residues, said method comprising:
providing a sample containing one or more parent nucleic acid molecules potentially containing the target nucleotide sequence differing from the nucleotide sequences of other parent nucleic acid molecules by one or more nucleotides, one or more copy numbers, one or more transcript sequences, and/or one or more methylated residues;
providing one or more enzymes capable of digesting deoxyuracil (dU)-containing nucleic acid molecules;
providing one or more nucleases capable of digesting nucleic acid molecules not comprising modified nucleotides;
providing one or more first primary oligonucleotide primer(s) that comprises a nucleotide sequence that is complementary to a sequence in the parent nucleic acid molecule adjacent to the target nucleotide sequence;
blending the sample, the one or more first primary oligonucleotide primers, the one or more enzymes capable of digesting deoxyuracil (dU)-containing nucleic acid molecules, a deoxynucleotide mix that comprises one or more modified nucleotides that protect extension products but not target DNA from nuclease digestion, and a DNA polymerase to form one or more polymerase extension reaction mixtures;
subjecting the one or more polymerase extension reaction mixtures to conditions suitable for digesting deoxyuracil (dU)-containing nucleic acid molecules present in the polymerase extension reaction mixture and for carrying out one or more polymerase extension reaction cycles comprising a denaturation treatment, a hybridization treatment, and an extension treatment, thereby forming primary extension products comprising the complement of the target nucleotide sequence;
providing one or more secondary oligonucleotide primer sets, each secondary oligonucleotide primer set comprising (a) a first secondary oligonucleotide primer having a first 5′ primer-specific portion and a 3′ portion that is complementary to a portion of a primary extension product formed from the first primary oligonucleotide primer and (b) a second secondary oligonucleotide primer having a second 5′ primer-specific portion and a 3′ portion that comprises a nucleotide sequence that is complementary to a portion of an extension product formed from the first secondary oligonucleotide primer;
blending the one or more polymerase extension reaction mixtures comprising the primary extension products, the one or more secondary oligonucleotide primer sets, the one or more nucleases, a deoxynucleotide mix, and a DNA polymerase to form one or more first polymerase chain reaction mixtures;
subjecting the one or more first polymerase chain reaction mixtures to conditions suitable for digesting nucleic acid molecules present in the first polymerase chain reaction mixtures, but not primary extension products comprising modified nucleotides and for carrying out two or more polymerase chain reaction cycles comprising a denaturation treatment, a hybridization treatment, and an extension treatment, thereby forming one or more first polymerase chain reaction products comprising the first 5′ primer-specific portion, a target-specific nucleotide sequence or a complement thereof, and a complement of the second 5′ primer-specific portion;
providing one or more tertiary oligonucleotide primer sets, each tertiary oligonucleotide primer set comprising (a) a first tertiary oligonucleotide primer comprising the same nucleotide sequence as the first 5′ primer-specific portion of the one or more first polymerase chain reaction products and (b) a second tertiary oligonucleotide primer comprising a nucleotide sequence that is complementary to the 3′ primer-specific portion of the one or more first polymerase chain reaction products;
blending the one or more first polymerase chain reaction products, the one or more tertiary oligonucleotide primer sets, the one or more enzymes capable of digesting deoxyuracil (dU)-containing nucleic acid molecules, a deoxynucleotide mix including dUTP, and a DNA polymerase to form one or more second polymerase chain reaction mixtures;
subjecting the one or more second polymerase chain reaction mixtures to conditions suitable for digesting deoxyuracil (dU) containing nucleic acid molecules present in the second polymerase chain reaction mixtures and for carrying out one or more polymerase chain reaction cycles comprising a denaturation treatment, a hybridization treatment, and an extension treatment, thereby forming one or more second polymerase chain reaction products; and
detecting and distinguishing the one or more second polymerase chain reaction products in the one or more second polymerase chain reaction mixtures to identify the presence of one or more parent nucleic acid molecules containing target nucleotide sequences differing from nucleotide sequences in other parent nucleic acid molecules in the sample by one or more nucleotides, one or more copy numbers, one or more transcript sequences, and/or one or more methylated residues.

3. A method for identifying, in a sample, one or more parent nucleic acid molecules containing a target nucleotide sequence differing from nucleotide sequences of other parent nucleic acid molecules in the sample by one or more nucleotides, one or more copy numbers, one or more transcript sequences, and/or one or more methylated residues, said method comprising:
providing a sample containing one or more parent nucleic acid molecules potentially containing the target nucleotide sequence differing from the nucleotide sequences of other parent nucleic acid molecules by one or more nucleotides, one or more copy numbers, one or more transcript sequences, and/or one or more methylated residues;
providing one or more enzymes capable of digesting deoxyuracil (dU)-containing nucleic acid molecules;
providing one or more nucleases capable of digesting nucleic acid molecules present not comprising modified nucleotides;
providing one or more primary oligonucleotide primer sets, each primary oligonucleotide primer set comprising (a) a first primary oligonucleotide primer that comprises a nucleotide sequence that is complementary to a sequence in the parent nucleic acid molecule adjacent to the target nucleotide sequence and (b) a second primary oligonucleotide primer that comprises a nucleotide sequence that is complementary to a portion of an extension product formed from the first primary oligonucleotide primer;
blending the sample, the one or more first primary oligonucleotide primers of the primary oligonucleotide primer sets, the one or more enzymes capable of digesting deoxyuracil (dU)-containing nucleic acid molecules, a deoxynucleotide mix that comprises one or more modified nucleotides that protect extension product but not target DNA from nuclease digestion, and a DNA polymerase to form one or more polymerase extension reaction mixtures;
subjecting the one or more polymerase extension reaction mixtures to conditions suitable for digesting deoxyuracil (dU)-containing nucleic acid molecules present in the polymerase extension reaction mixtures and for carrying out one or more polymerase extension reaction cycles comprising a denaturation treatment, a hybridization treatment, and an extension treatment, thereby forming primary extension products comprising the complement of the target nucleotide sequence;
blending the one or more polymerase extension reaction mixtures comprising the primary extension products, the one or more second primary oligonucleotide primers of the one or more primary oligonucleotide primer sets, the one or more nucleases, a deoxynucleotide mix, and a DNA polymerase to form one or more first polymerase chain reaction mixtures;
subjecting the one or more first polymerase chain reaction mixtures to conditions suitable for digesting nucleic acid molecules present in the polymerase chain reaction mixtures, but not primary extension products comprising modified nucleotides and for carrying out two or more polymerase chain reaction cycles comprising a denaturation treatment, a hybridization treatment, and an extension treatment, thereby forming first polymerase chain reaction products comprising the target nucleotide sequence or a complement thereof;
providing one or more secondary oligonucleotide primer sets, each secondary oligonucleotide primer set comprising (a) a first secondary oligonucleotide primer having a 3′ portion that is complementary to a portion of an extension product formed from the first primary oligonucleotide primer and (b) a second secondary oligonucleotide primer having a 3′ portion that comprises a nucleotide sequence that is complementary to a portion of an extension product formed from the first secondary oligonucleotide primer;
blending the first polymerase chain reaction products, the one or more secondary oligonucleotide primer sets, the one or more enzymes capable of digesting deoxyuracil (dU) containing nucleic acid molecules, a deoxynucleotide mix including dUTP, and a DNA polymerase to form one or more second polymerase chain reaction mixtures;
subjecting the one or more second polymerase chain reaction mixtures to conditions suitable for digesting deoxyuracil (dU)-containing nucleic acid molecules present in the second polymerase chain reaction mixtures and for carrying out two or more polymerase chain reaction cycles comprising a denaturation treatment, a hybridization treatment, and an extension treatment thereby forming second polymerase chain reaction products; and
detecting and distinguishing the second polymerase chain reaction products in the one or more second polymerase chain reaction mixtures to identify the presence of one or more parent nucleic acid molecules containing target nucleotide sequences differing from nucleotide sequences in other parent nucleic acid molecules in the sample by one or more nucleotides, one or more copy numbers, one or more transcript sequences, and/or one or more methylated residues.

4. A method for identifying, in a sample, one or more parent nucleic acid molecules containing a target nucleotide sequence differing from nucleotide sequences in other parent nucleic acid molecules in the sample by one or more methylated residues, said method comprising:
providing a sample containing one or more parent nucleic acid molecules potentially containing the target nucleotide sequence differing from the nucleotide sequences in other parent nucleic acid molecules by one or more methylated residues;
subjecting the nucleic acid molecules in the sample to a bisulfite treatment under conditions suitable to convert unmethylated cytosine residues to uracil residues;
providing one or more enzymes capable of digesting deoxyuracil (dU)-containing nucleic acid molecules;
providing one or more primary oligonucleotide primer sets, each primary oligonucleotide primer set comprising (a) a first primary oligonucleotide primer that comprises a nucleotide sequence that is complementary to a sequence in the bisulfite-treated parent nucleic acid molecules adjacent to the bisulfite-treated target nucleotide sequence containing the one or more methylated residue and (b) a second primary oligonucleotide primer that comprises a nucleotide sequence that is complementary to a portion of an extension product formed from the first primary oligonucleotide primer;
blending the bisulfite-treated sample, the one or more first primary oligonucleotide primers of the one or more primary oligonucleotide primer sets, a deoxynucleotide mix, and a DNA polymerase to form one or more polymerase extension reaction mixtures;
subjecting the one or more polymerase extension reaction mixtures to conditions suitable for one or more polymerase extension reaction cycles comprising a denaturation treatment, a hybridization treatment, and an extension treatment, thereby forming primary extension products comprising the complement of the bisulfite-treated target nucleotide sequence;
blending the one or more polymerase extension reaction mixtures comprising the primary extension products, the one or more secondary primary oligonucleotide primers of the one or more primary oligonucleotide primer sets, the one or more enzymes capable of digesting deoxyuracil (dU)-containing nucleic acid molecules, a deoxynucleotide mix including dUTP, and a DNA polymerase to form one or more first polymerase chain reaction mixtures;
subjecting the one or more first polymerase chain reaction mixtures to conditions suitable for digesting deoxyuracil (dU)-containing nucleic acid molecules present in the first polymerase chain reaction mixtures and for carrying out one or more polymerase chain reaction cycles comprising a denaturation treatment, a hybridization treatment, and an extension treatment, thereby forming first polymerase chain reaction products comprising the bisulfate-treated target nucleotide sequence or a complement thereof;
providing one or more oligonucleotide probe sets, each probe set comprising (a) a first oligonucleotide probe having a 5′ primer-specific portion and a 3′ bisulfate-treated target nucleotide sequence-specific or complement sequence-specific portion, and (b) a second oligonucleotide probe having a 5′ bisulfate-treated target nucleotide sequence-specific or complement sequence-specific portion and a 3′ primer-specific portion, and wherein the first and second oligonucleotide probes of a probe set are configured to hybridize, in a base specific manner, on a complementary nucleotide sequence of a first polymerase chain reaction product;
blending the first polymerase chain reaction products with a ligase and the one or more oligonucleotide probe sets to form one or more ligation reaction mixtures;
subjecting the one or more ligation reaction mixtures to one or more ligation reaction cycles whereby the first and second oligonucleotide probes of the one or more oligonucleotide probe sets are ligated together, when hybridized to complementary sequences, to form ligated product sequences in the ligation reaction mixture wherein each ligated product sequence comprises the 5′ primer-specific portion, the bisulfite-treated target nucleotide sequence-specific or complement sequence-specific portions, and the 3′ primer-specific portion;
providing one or more secondary oligonucleotide primer sets, each secondary oligonucleotide primer set comprising (a) a first secondary oligonucleotide primer comprising the same nucleotide sequence as the 5′ primer-specific portion of the ligated product sequence and (b) a second secondary oligonucleotide primer comprising a nucleotide sequence that is complementary to the 3′ primer-specific portion of the ligated product sequence;
blending the ligated product sequences, the one or more secondary oligonucleotide primer sets, the one or more enzymes capable of digesting deoxyuracil (dU)-containing nucleic acid molecules, a deoxynucleotide mix including dUTP, and a DNA polymerase to form one or more second polymerase chain reaction mixtures;
subjecting the one or more second polymerase chain reaction mixtures to conditions suitable for digesting deoxyuracil (dU)-containing nucleic acid molecules present in the second polymerase chain reaction mixtures and for carrying out one or more polymerase chain reaction cycles comprising a denaturation treatment, a hybridization treatment, and an extension treatment thereby forming a second polymerase chain reaction products; and
detecting and distinguishing the second polymerase chain reaction products in the one or more second polymerase chain reaction mixtures to identify the presence of one or more nucleic acid molecules containing target nucleotide sequences differing from nucleotide sequences in other parent nucleic acid molecules in the sample by one or more methylated residues.

5. A method for identifying, in a sample, one or more parent nucleic acid molecules containing a target nucleotide sequence differing from nucleotide sequences in other parent nucleic acid molecules in the sample by one or more methylated residues, said method comprising:
providing a sample containing one or more parent nucleic acid molecules potentially containing the target nucleotide sequence differing from the nucleotide sequences in other parent nucleic acid molecules by one or more methylated residues;
subjecting the nucleic acid molecules in the sample to a bisulfite treatment under conditions suitable to convert unmethylated cytosine residues to uracil residues;
providing one or more enzymes capable of digesting deoxyuracil (dU)-containing nucleic acid molecules;
providing one or more first primary oligonucleotide primer(s) that comprises a nucleotide sequence that is complementary to a sequence in the bisulfite-treated parent nucleic acid molecules adjacent to the bisulfite-treated target nucleotide sequence containing the one or more methylated residue;
blending the bisulfite-treated sample, the one or more first primary oligonucleotide primers, a deoxynucleotide mix, and a DNA polymerase to form one or more polymerase extension reaction mixtures;
subjecting the one or more polymerase extension reaction mixtures to conditions suitable for one or more polymerase extension reaction cycles comprising a denaturation treatment, a hybridization treatment, and an extension treatment, thereby forming primary extension products comprising the complement of the bisulfite-treated target nucleotide sequence;
providing one or more secondary oligonucleotide primer sets, each secondary oligonucleotide primer set comprising (a) a first secondary oligonucleotide primer having a 5′ primer-specific portion and a 3′ portion that is complementary to a portion of the polymerase extension reaction product formed from the first primary oligonucleotide primer and (b) a second secondary oligonucleotide primer having a 5′ primer-specific portion and a 3′ portion that comprises a nucleotide sequence that is complementary to a portion of an extension product formed from the first secondary oligonucleotide primer;
blending the one or more polymerase extension reaction mixtures comprising the primary extension products, the one or more secondary oligonucleotide primer sets, the one or more enzymes capable of digesting deoxyuracil (dU)-containing nucleic acid molecules, a deoxynucleotide mix, and a DNA polymerase to form one or more first polymerase chain reaction mixtures;
subjecting the one or more first polymerase chain reaction mixtures to conditions suitable for digesting nucleic acid molecules present in the first polymerase chain reaction mixtures, but not primary extension products comprising modified nucleotides and for carrying out two or more polymerase chain reaction cycles comprising a denaturation treatment, a hybridization treatment, and an extension treatment, thereby forming first polymerase chain reactions products comprising a 5′ primer-specific portion of the first secondary oligonucleotide primer, the bisulfite-treated target nucleotide sequence-specific or complement sequence-specific portion, and a complement of the 5′ primer-specific portion of the second secondary oligonucleotide primer;
providing one or more tertiary oligonucleotide primer sets, each tertiary oligonucleotide primer set comprising (a) a first tertiary oligonucleotide primer comprising the same nucleotide sequence as the 5′ primer-specific portion of the first polymerase chain reaction products and (b) a second tertiary oligonucleotide primer comprising a nucleotide sequence that is complementary to the 3′ primer-specific portion of the first polymerase chain reactions product sequence;
blending the first polymerase chain reaction products, the one or more tertiary oligonucleotide primer sets, the one or more enzymes capable of digesting deoxyuracil (dU) containing nucleic acid molecules, a deoxynucleotide mix including dUTP, and a DNA polymerase to form one or more second polymerase chain reaction mixtures;
subjecting the one or more second polymerase chain reaction mixtures to conditions suitable for digesting deoxyuracil (dU)-containing nucleic acid molecules present in the second polymerase chain reaction mixtures and for carrying out one or more polymerase chain reaction cycles comprising a denaturation treatment, a hybridization treatment, and an extension treatment thereby forming secondary polymerase chain reaction products; and
detecting and distinguishing the secondary polymerase chain reactions products in the one or more second polymerase chain reaction mixtures to identify the presence of one or more parent nucleic acid molecules containing target nucleotide sequences differing from nucleotide sequences in other parent nucleic acid molecules in the sample by one or more methylated residues.

6. A method for identifying, in a sample, one or more parent nucleic acid molecules containing a target nucleotide sequence differing from nucleotide sequences in other parent nucleic acid molecules in the sample by one or more methylated residues, said method comprising:
providing a sample containing one or more parent nucleic acid molecules potentially containing the target nucleotide sequence differing from the nucleotide sequences in other parent nucleic acid molecules by one or more methylated residues;
subjecting the nucleic acid molecules in the sample to a bisulfite treatment under conditions suitable to convert unmethylated cytosine residues to uracil residues;
providing one or more enzymes capable of digesting deoxyuracil (dU)-containing nucleic acid molecules present in the sample;
providing one or more primary oligonucleotide primer sets, each primary oligonucleotide primer set comprising (a) a first primary oligonucleotide primer that comprises a nucleotide sequence that is complementary to a sequence in the bisulfite-treated parent nucleic acid molecules adjacent to the bisulfite-treated target nucleotide sequence containing the one or more methylated residue and (b) a second primary oligonucleotide primer that comprises a nucleotide sequence that is complementary to a portion of an extension product formed from the first primary oligonucleotide primer;
blending the bisulfite-treated sample, the one or more first primary oligonucleotide primers of the one or more primary oligonucleotide primer sets, a deoxynucleotide mix, and a DNA polymerase to form one or more polymerase extension reaction mixtures;
subjecting the one or more polymerase extension reaction mixtures to conditions suitable for one or more polymerase extension reaction cycles comprising a denaturation treatment, a hybridization treatment, and an extension treatment, thereby forming primary extension products comprising the complement of the bisulfite treated target nucleotide sequence;
blending the one or more polymerase extension reaction mixtures comprising the primary extension products, the one or more secondary primary oligonucleotide primers of the one or more primary oligonucleotide primer sets, the one or more enzymes capable of digesting deoxyuracil (dU)-containing nucleic acid molecules in the reaction mixture, a deoxynucleotide mix, and a DNA polymerase to form one or more first polymerase chain reaction mixtures;
subjecting the one or more first polymerase chain reaction mixtures to conditions suitable for digesting deoxyuracil (dU)-containing nucleic acid molecules present in the first polymerase chain reaction mixtures and for carrying out one or more polymerase chain reaction cycles comprising a denaturation treatment, a hybridization treatment, and an extension treatment, thereby forming first polymerase chain reaction products comprising the bisulfite-treated target nucleotide sequence or a complement thereof;
providing one or more secondary oligonucleotide primer sets, each secondary oligonucleotide primer set comprising (a) a first secondary oligonucleotide primer having a 3′ portion that is complementary to a portion of a first polymerase chain reaction product formed from the first primary oligonucleotide primer and (b) a second secondary oligonucleotide primer having a 3′ portion that comprises a nucleotide sequence that is complementary to a portion of a first polymerase chain reaction product formed from the first secondary oligonucleotide primer;
blending the first polymerase chain reaction products, the one or more secondary oligonucleotide primer sets, the one or more enzymes capable of digesting deoxyuracil (dU)-containing nucleic acid molecules, a deoxynucleotide mix including dUTP, and a DNA polymerase to form one or more second polymerase chain reaction mixtures;
subjecting the one or more second polymerase chain reaction mixtures to conditions suitable for digesting deoxyuracil (dU)-containing nucleic acid molecules present in the second polymerase chain reaction mixtures and for carrying out two or more polymerase chain reaction cycles comprising a denaturation treatment, a hybridization treatment, and an extension treatment thereby forming second polymerase chain reaction products; and
detecting and distinguishing the second polymerase chain reactions products in the one or more second polymerase chain reaction mixtures to identify the presence of one or more parent nucleic acid molecules containing target nucleotide sequences differing from nucleotide sequences in other parent nucleic acid molecules in the sample by one or more methylated residues.

7. A method for identifying, in a sample, one or more parent nucleic acid molecules containing a target nucleotide sequence differing from nucleotide sequences in other parent nucleic acid molecules in the sample by one or more methylated residues, said method comprising:
providing a sample containing one or more parent nucleic acid molecules potentially containing the target nucleotide sequence differing from the nucleotide sequences in other parent nucleic acid molecules by one or more methylated residues;
subjecting the nucleic acid molecules in the sample to a bisulfite treatment under conditions suitable to convert unmethylated cytosine residues to uracil residues;
providing one or more enzymes capable of digesting deoxyuracil (dU)-containing nucleic acid molecules present in the sample;
providing one or more primary oligonucleotide primer sets, each primary oligonucleotide primer set comprising (a) a first primary oligonucleotide primer having a 5′ primer-specific portion and a 3′ portion that comprises a nucleotide sequence that is complementary to a sequence in the bisulfite-treated parent nucleic acid molecules adjacent to the bisulfite-treated target nucleotide sequence containing the one or more methylated residue and (b) a second primary oligonucleotide primer having a 5′ primer-specific portion and a 3′ portion that comprises a nucleotide sequence that is complementary to a portion of an extension product formed from the first primary oligonucleotide primer;
blending the bisulfite treated sample, the one or more first primary oligonucleotide primers of the one or more primary oligonucleotide primer sets, a deoxynucleotide mix, and a DNA polymerase to form one or more polymerase extension reaction mixtures;
subjecting the one or more polymerase extension reaction mixtures to conditions suitable for one or more polymerase extension reaction cycles comprising a denaturation treatment, a hybridization treatment, and an extension treatment, thereby forming primary extension products comprising the complement of the bisulfite treated target nucleotide sequence;
blending the one or more polymerase extension reaction mixtures comprising the primary extension products, the one or more secondary primary oligonucleotide primers of the one or more primary oligonucleotide primer sets, the one or more enzymes capable of digesting deoxyuracil (dU)-containing nucleic acid molecules in the reaction mixture, a deoxynucleotide mix, and a DNA polymerase to form one or more first polymerase chain reaction mixtures;
subjecting the one or more first polymerase chain reaction mixtures to conditions suitable for digesting deoxyuracil (dU)-containing nucleic acid molecules present in the polymerase chain reaction mixtures and for carrying out one or more polymerase chain reaction cycles comprising a denaturation treatment, a hybridization treatment, and an extension treatment, thereby forming first polymerase chain reactions products comprising the bisulfite-treated target nucleotide sequence or a complement thereof;
providing one or more secondary oligonucleotide primer sets, each secondary oligonucleotide primer set comprising (a) a first secondary oligonucleotide primer comprising the same nucleotide sequence as the 5′ primer-specific portion of the first polymerase chain reaction products or their complements and (b) a second secondary oligonucleotide primer comprising a nucleotide sequence that is complementary to the 3′ primer-specific portion of the first polymerase chain reaction products or their complements;
blending the primary polymerase chain reaction product sequences, the one or more secondary oligonucleotide primer sets, the one or more enzymes capable of digesting deoxyuracil (dU)-containing nucleic acid molecules, a deoxynucleotide mix including dUTP, and a DNA polymerase to form one or more second polymerase chain reaction mixtures;
subjecting the one or more second polymerase chain reaction mixtures to conditions suitable for digesting deoxyuracil (dU)-containing nucleic acid molecules present in the second polymerase chain reaction mixtures and for carrying out one or more polymerase chain reaction cycles comprising a denaturation treatment, a hybridization treatment, and an extension treatment thereby forming second polymerase chain reaction products; and
detecting and distinguishing the second polymerase chain reactions products in the one or more second polymerase chain reaction mixtures to identify the presence of one or more parent nucleic acid molecules containing target nucleotide sequences differing from nucleotide sequences in other parent nucleic acid molecules in the sample by one or more methylated residues.

8. The method of any one of claims 1 through 7 further comprising:
contacting the sample with DNA repair enzymes to repair damaged DNA, abasic sites, oxidized bases, or nicks in the DNA.

9. The method of any one of claims 4 through 7 further comprising:
contacting the sample with at least a first methylation sensitive enzyme to form a restriction enzyme reaction mixture prior to, or concurrent with, said blending to form one or more polymerase extension reaction mixtures, wherein said first methylation sensitive enzyme cleaves nucleic acid molecules in the sample that contain one or more unmethylated residues within at least one methylation sensitive enzyme recognition sequence, and whereby said detecting involves detection of one or more parent nucleic acid molecules containing the target nucleotide sequence, wherein said parent nucleic acid molecules originally contained one or more methylated residues.

10. The method of any one of claims 4 through 7 further comprising:
contacting the sample with an immobilized methylated nucleic acid binding protein or antibody to selectively bind and enrich for methylated nucleic acid in the sample.

11. The method of any one of claims 1 through 7, wherein primers from said one or more primary or secondary oligonucleotide primer sets comprise a portion that has no or one nucleotide sequence mismatch when hybridized in a base-specific manner to the target nucleic acid sequence or bisulfite-converted methylated nucleic acid sequence or complement sequence thereof, but have one or more additional nucleotide sequence mismatches that interferes with polymerase extension when primers from said one or more primary or secondary oligonucleotide primer sets hybridize in a base-specific manner to a corresponding nucleotide sequence portion in wildtype nucleic acid sequence or bisulfite-converted unmethylated nucleic acid sequence or complement sequence thereof.

12. The method of any one of claims 1 through 7, wherein one or both primary oligonucleotide primers of the primary oligonucleotide primer set and/or one or both secondary oligonucleotide primers of the secondary oligonucleotide primer set have a 3′ portion comprising a cleavable nucleotide or nucleotide analogue and a blocking group, such that the 3′ end of said primer or primers is unsuitable for polymerase extension, said method further comprising:
cleaving the cleavable nucleotide or nucleotide analog of one or both oligonucleotide primers during said hybridization treatment, thereby liberating free 3′OH ends on one or both oligonucleotide primers prior to said extension treatment.

13. The method of claim 12, wherein primers from said one or more primary or secondary oligonucleotide primer sets comprise a sequence that differs from the target nucleic acid sequence or bisulfite-converted methylated nucleic acid sequence or complement sequence thereof, said difference is located two or three nucleotide bases from the liberated free 3′OH end.

14. The method of claim 12, wherein the cleavable nucleotide comprises one or more RNA bases.

15. The method of any one of claims 1 through 7 further comprising;
providing one or more blocking oligonucleotide primers comprising one or more mismatched bases at the 3′ end or one or more nucleotide analogs and a blocking group at the 3′ end, such that the 3′ end of said blocking oligonucleotide primer is unsuitable for polymerase extension when hybridized in a base-specific manner to wildtype nucleic acid sequence or bisulfite-converted unmethylated nucleic acid sequence or complement sequence thereof, wherein said blocking oligonucleotide primer comprises a portion having a nucleotide sequence that is the same as a nucleotide sequence portion in the wildtype nucleic acid sequence or bisulfite-converted unmethylated nucleic acid sequence or complement sequence thereof to which the blocking oligonucleotide primer hybridizes but has one or more nucleotide sequence mismatches to a corresponding nucleotide sequence portion in the target nucleic acid sequence or bisulfite-converted methylated nucleic acid sequence or complement sequence thereof and
blending the one or more blocking oligonucleotide primers with the sample or subsequent products prior to a polymerase extension reaction, polymerase chain reaction, or ligation reaction, whereby during hybridization said one or more blocking oligonucleotide primers preferentially hybridize in a base-specific manner to a wildtype nucleic acid sequence or bisulfite-converted unmethylated nucleic acid sequence or complement sequence thereof, thereby interfering with polymerase extension or ligation during reaction of a primer or probes hybridized in a base-specific manner to the wildtype sequence or bisulfite-converted unmethylated sequence or complement sequence thereof.

16. The method of any one of claim 3 or 6, wherein the first secondary oligonucleotide primer has a 5′ primer-specific portion and the second secondary oligonucleotide primer has a 5′ primer-specific portion, said one or more secondary oligonucleotide primer sets further comprising a third secondary oligonucleotide primer comprising the same nucleotide sequence as the 5′ primer-specific portion of the first secondary oligonucleotide primer and (d) a fourth secondary oligonucleotide primer comprising the same nucleotide sequence as the 5′ primer-specific portion of the second secondary oligonucleotide primer.

17. A method for identifying in a sample, one or more parent ribonucleic acid molecules containing a target ribonucleic acid sequence differing from ribonucleic acid sequences of other parent ribonucleic acid molecules in the sample due to alternative splicing, alternative transcript, alternative start site, alternative coding sequence, alternative non-coding sequence, exon insertion, exon deletion, intron insertion, translocation, mutation, or other rearrangement at the genome level, said method comprising:
providing a sample containing one or more parent ribonucleic acid molecules containing a target ribonucleic acid molecule potentially differing in sequence from other parent ribonucleic acid molecules;
providing one or more enzymes capable of digesting deoxyuracil (dU) containing nucleic acid molecules present in the sample;
contacting the sample with one or more enzymes capable of digesting dU containing nucleic acid molecules potentially present in the sample;
providing one or more primary oligonucleotide primer sets, each primary oligonucleotide primer set comprising (a) a first primary oligonucleotide primer that comprises a nucleotide sequence that is complementary to the RNA sequence in the parent ribonucleic acid molecule adjacent to the target ribonucleotide sequence and (b) a second primary oligonucleotide primer that comprises a nucleotide sequence that is complementary to a portion of the cDNA extension product formed from the first primary oligonucleotide primer;
blending the contacted sample, the one or more primary oligonucleotide primer sets, a deoxynucleotide mix including dUTP, a reverse transcriptase, and a DNA polymerase or a DNA polymerase with reverse-transcriptase activity to form one or more reverse-transcription/polymerase chain reaction mixtures;
subjecting the one or more reverse-transcription/polymerase chain reaction mixtures to conditions suitable for generating complementary deoxyribonucleic acid (cDNA) molecules to the target ribonucleic nucleic acid and to carry out one or more polymerase chain reaction cycles comprising a denaturation treatment, a hybridization treatment, and an extension treatment thereby forming one or more different reverse transcription/polymerase products;
providing one or more oligonucleotide probe sets, each probe set comprising (a) a first oligonucleotide probe having a 5′ primer-specific portion and a 3′ target sequence-specific portion, and (b) a second oligonucleotide probe having a 5′ target sequence-specific portion and a 3′ primer-specific portion, wherein the first and second oligonucleotide probes of a probe set are configured to hybridize, in a base specific manner, on complementary portions of a reverse transcriptase/polymerase product corresponding to the target ribonucleic acid molecule sequence;
contacting the reverse transcriptase/polymerase products with a ligase and the one or more oligonucleotide probe sets to form one or more ligation reaction mixtures;
subjecting the one or more ligation reaction mixtures to one or more ligation reaction cycles whereby the first and second probes of the one or more oligonucleotide probe sets, when hybridized to their complement, are ligated together to form ligated product sequences in the ligase reaction mixture, wherein each ligated product sequence comprises the 5′ primer-specific portion, the target-specific portions, and the 3′ primer-specific portion;
providing one or more secondary oligonucleotide primer sets, each secondary oligonucleotide primer set comprising (a) a first secondary oligonucleotide primer comprising the same nucleotide sequence as the 5′ primer-specific portion of the ligated product sequence and (b) a second secondary oligonucleotide primer comprising a nucleotide sequence that is complementary to the 3′ primer-specific portion of the ligated product sequence;
blending the ligated product sequences, the one or more secondary oligonucleotide primer sets with one or more enzymes capable of digesting deoxyuracil (dU)-containing nucleic acid molecules, a deoxynucleotide mix including dUTP, and a DNA polymerase to form one or more first polymerase chain reaction mixtures;
subjecting the one or more first polymerase chain reaction mixtures to conditions suitable for digesting deoxyuracil (dU)-containing nucleic acid molecules present in the first polymerase chain reaction mixtures and for carrying out one or more polymerase chain reaction cycles comprising a denaturation treatment, a hybridization treatment, and an extension treatment thereby forming first polymerase chain reaction products; and
detecting and distinguishing the first polymerase chain reaction products, thereby identifying the presence of one or more parent ribonucleic acid molecules containing a target ribonucleic acid sequence differing from ribonucleic acid sequences of other parent ribonucleic acid molecules in the sample due to alternative splicing, alternative transcript, alternative start site, alternative coding sequence, alternative non-coding sequence, exon insertion, exon deletion, intron insertion, translocation, mutation, or other rearrangement at the genome level.

18. A method for identifying in a sample, one or more parent ribonucleic acid molecules containing a target ribonucleic acid sequence differing from ribonucleic acid sequences of other parent ribonucleic acid molecules in the sample due to alternative splicing, alternative transcript, alternative start site, alternative coding sequence, alternative non-coding sequence, exon insertion, exon deletion, intron insertion, translocation, mutation, or other rearrangement at the genome level, said method comprising:
providing a sample containing one or more parent ribonucleic acid molecules containing a target ribonucleic acid molecule potentially differing in sequence from other parent ribonucleic acid molecules;
providing one or more enzymes capable of digesting deoxyuracil (dU)-containing nucleic acid molecules present in the sample;
contacting the sample with one or more enzymes capable of digesting dU containing nucleic acid molecules potentially present in the sample;
providing one or more primary oligonucleotide primer sets, each primary oligonucleotide primer set comprising (a) a first primary oligonucleotide primer that comprises a nucleotide sequence that is complementary to the RNA sequence in the parent ribonucleic acid molecule adjacent to the target nucleotide sequence and (b) a second primary oligonucleotide primer that comprises a nucleotide sequence that is complementary to a portion of the cDNA extension product formed from the first primary oligonucleotide primer;
blending the contacted sample, the one or more primary oligonucleotide primer sets, a deoxynucleotide mix, a reverse transcriptase and a DNA polymerase or a DNA polymerase with reverse-transcriptase activity to form one or more reverse-transcription/polymerase chain reaction mixtures;
subjecting the one or more reverse-transcription/polymerase chain reaction mixtures to conditions suitable for generating complementary deoxyribonucleic acid (cDNA) molecules to the target RNA and to carry out one or more polymerase chain reaction cycles comprising a denaturation treatment, a hybridization treatment, and an extension treatment thereby forming one or more different reverse-transcription/primary polymerase chain reaction products;
providing one or more secondary oligonucleotide primer sets, each secondary oligonucleotide primer set comprising (a) a first secondary oligonucleotide primer having a 3′ portion that is complementary to a portion of a reverse-transcription/primary polymerase chain reaction product formed from the first primary oligonucleotide primer and (b) a second secondary oligonucleotide primer having a 3′ portion that comprises a nucleotide sequence that is complementary to a portion of a reverse-transcription/primary polymerase chain reaction product formed from the first secondary oligonucleotide primer;
blending the reverse-transcription/primary polymerase chain reaction products, the one or more secondary oligonucleotide primer sets, the one or more enzymes capable of digesting deoxyuracil (dU) containing nucleic acid molecules, a deoxynucleotide mix including dUTP, and a DNA polymerase to form one or more first polymerase chain reaction mixtures;
subjecting the one or more first polymerase chain reaction mixtures to conditions suitable for digesting deoxyuracil (dU)-containing nucleic acid molecules present in the first polymerase chain reaction mixtures and for carrying out two or more polymerase chain reaction cycles comprising a denaturation treatment, a hybridization treatment, and an extension treatment thereby forming first polymerase chain reaction products; and
detecting and distinguishing the first polymerase chain reaction products, thereby identifying the presence of one or more parent ribonucleic acid molecules containing a target ribonucleic acid sequences differing from ribonucleic acid sequences of other parent ribonucleic acid molecules in the sample due to alternative splicing, alternative transcript, alternative start site, alternative coding sequence, alternative non-coding sequence, exon insertion, exon deletion, intron insertion, translocation, mutation, or other rearrangement at the genome level.

19. A method for identifying, in a sample, one or more target micro-ribonucleic acid (miRNA) molecules differing in sequence from other miRNA molecules in the sample by one or more bases, said method comprising:
providing a sample containing one or more target miRNA molecules potentially differing in sequence from other miRNA molecules in the sample by one or more bases;
providing one or more enzymes capable of digesting deoxyuracil (dU)-containing nucleic acid molecules present in the sample;
contacting the sample with one or more enzymes capable of digesting dU-containing nucleic acid molecules potentially present in the sample;
blending the contacted sample with a ligase and one or more first oligonucleotide preliminary probes comprising a 5′ phosphate, a 5′ stem-loop portion, an internal primer-specific portion within the loop region, a blocking group, and a 3′ nucleotide sequence that is complementary to a 3′ portion of the target miRNA molecule sequence to form one or more first ligation reaction mixtures;
ligating, in the one or more first ligation reaction mixtures, the one or more target miRNA molecules at their 3′ end to the 5′ phosphate of the one or more first oligonucleotide preliminary probes to generate chimeric nucleic acid molecules comprising the target miRNA molecule sequence, if present in the sample, appended to the one or more first oligonucleotide preliminary probes;
providing one or more primary oligonucleotide primer sets, each primer set comprising (a) a first primary oligonucleotide primer comprising a nucleotide sequence that is complementary to the internal primer-specific portion of the first oligonucleotide preliminary probe, and (b) a second primary oligonucleotide primer comprising a 5′ primer-specific portion and a 3′ portion, wherein the second primary oligonucleotide primer may be the same or may differ from other second primary oligonucleotide primers in other sets;
blending the one or more first ligation reaction mixtures comprising chimeric nucleic acid molecules, the one or more primary oligonucleotide primer sets, the one or more enzymes capable of digesting deoxyuracil (dU)-containing nucleic acid molecules in the sample, a deoxynucleotide mix including dUTP, and a reverse transcriptase and a DNA polymerase or a DNA polymerase with reverse-transcriptase activity to form one or more reverse-transcription/polymerase chain reaction mixtures,
subjecting the one or more reverse-transcription/polymerase chain reaction mixtures to conditions suitable for digesting deoxyuracil (dU)-containing nucleic acid molecules present in the reverse-transcription/polymerase chain reaction mixtures to conditions suitable for generating complementary deoxyribonucleic acid (cDNA) molecules to the chimeric nucleic acid molecules, and to one or more polymerase chain reaction cycles comprising a denaturation treatment, a hybridization treatment, and an extension treatment thereby forming one or more different primary reverse-transcription/polymerase chain reaction products comprising the 5′ primer-specific portion, a nucleotide sequence corresponding to the target miRNA molecule sequence, and the complement of the internal primer-specific portion, and complements thereof;
providing one or more oligonucleotide probe sets, each probe set comprising (a) a first oligonucleotide probe having a 5′ primer-specific portion and a 3′ target sequence-specific portion, and (b) a second oligonucleotide probe having a 5′ target sequence-specific portion, a portion complementary to a primary extension product, and a 3′ primer-specific portion, wherein the first and second oligonucleotide probes of a probe set are configured to hybridize, in a base specific manner, on complementary portions of a primary reverse-transcription/polymerase chain reaction product corresponding to the target miRNA molecule sequence, or complement thereof;
contacting the primary reverse-transcription/polymerase chain reaction products with a ligase and the one or more oligonucleotide probe sets to form one or more second ligation reaction mixtures;
subjecting the one or more second ligation reaction mixtures to one or more ligation reaction cycles whereby the first and second oligonucleotide probes of the one or more oligonucleotide probe sets, when hybridized to their complement, are ligated together to form ligated product sequences in the ligation reaction mixture, wherein each ligated product sequence comprises the 5′ primer-specific portion, the target-specific portions, and the 3′ primer-specific portion;
providing one or more secondary oligonucleotide primer sets, each secondary oligonucleotide primer set comprising (a) a first secondary oligonucleotide primer comprising the same nucleotide sequence as the 5′ primer-specific portion of the ligated product sequence and (b) a second secondary oligonucleotide primer comprising a nucleotide sequence that is complementary to the 3′ primer-specific portion of the ligated product sequence;
blending the ligated product sequences and the one or more secondary oligonucleotide primer sets, with one or more enzymes capable of digesting deoxyuracil (dU)-containing nucleic acid molecules, a deoxynucleotide mix including dUTP, and a DNA polymerase to form one or more second polymerase chain reaction mixtures;
subjecting the one or more second polymerase chain reaction mixtures to conditions suitable for digesting deoxyuracil (dU)-containing nucleic acid molecules present in the second polymerase chain reaction mixtures and for carrying out one or more polymerase chain reaction cycles comprising a denaturation treatment, a hybridization treatment, and an extension treatment thereby forming secondary polymerase chain reaction products; and
detecting and distinguishing the secondary polymerase chain reaction products in the one or more reactions thereby identifying one or more target miRNA molecules differing in sequence from other miRNA molecules in the sample by one or more bases.

20. A method for identifying, in a sample, one or more target micro-ribonucleic acid (miRNA) molecules differing in sequence from other miRNA molecules in the sample by one or more bases, said method comprising:
providing a sample containing one or more target miRNA molecules potentially differing in sequence from other miRNA molecules in the sample by one or more bases;
providing one or more enzymes capable of digesting deoxyuracil (dU)-containing nucleic acid molecules present in the sample;
contacting the sample with one or more enzymes capable of digesting dU-containing nucleic acid molecules potentially present in the sample;
blending the contacted sample with a ligase and one or more first oligonucleotide probes comprising a 5′ phosphate, a 5′ stem-loop portion, an internal primer-specific portion within the loop region, a blocking group, and a 3′ nucleotide sequence that is complementary to a 3′ portion of the target miRNA molecule sequence to form one or more ligation reaction mixtures;
ligating, in the one or more ligation reaction mixtures, the one or more target miRNA molecules at their 3′ end to the 5′ phosphate of the one or more first oligonucleotide probes to generate chimeric nucleic acid molecules comprising the target miRNA molecule sequence, if present in the sample, appended to the one or more first oligonucleotide probes;
providing one or more primary oligonucleotide primer sets, each primer set comprising (a) a first primary oligonucleotide primer comprising a nucleotide sequence that is complementary to the internal primer-specific portion of the first oligonucleotide probe, and (b) a second primary oligonucleotide primer comprising a 5′ primer-specific portion and a 3′ portion, wherein the second primary oligonucleotide primer may be the same or may differ from other second primary oligonucleotide primers in other sets;
blending the one or more ligation reaction mixtures comprising chimeric nucleic acid molecules, the one or more primary oligonucleotide primer sets, a deoxynucleotide mix, and a reverse transcriptase and a DNA polymerase or a DNA polymerase with reverse-transcriptase activity to form one or more reverse-transcription/polymerase chain reaction mixtures,
subjecting the one or more reverse-transcription/polymerase chain reaction mixtures to conditions suitable for generating complementary deoxyribonucleic acid (cDNA) molecules to the chimeric nucleic acid molecules, and to one or more polymerase chain reaction cycles comprising a denaturation treatment, a hybridization treatment, and an extension treatment thereby forming one or more different primary reverse-transcription/polymerase chain reaction products comprising the 5′ primer-specific portion, a nucleotide sequence corresponding to the target miRNA molecule sequence, and the complement of the internal primer-specific portion, and complements thereof;
providing one or more secondary oligonucleotide primer sets, each secondary oligonucleotide primer set comprising (a) a first secondary oligonucleotide primer having a 5′ primer-specific portion and a 3′ portion that is complementary to a portion of an extension product formed from the first primary oligonucleotide primer and (b) a second secondary oligonucleotide primer having a 5′ primer-specific portion and a 3′ portion that comprises a nucleotide sequence that is complementary to a portion of an extension product formed from the first secondary oligonucleotide primer;
blending the primary reverse-transcription/polymerase chain reaction products, the one or more secondary oligonucleotide primer sets, a deoxynucleotide mix, and a DNA polymerase to form one or more first polymerase chain reaction mixtures;
subjecting the one or more first polymerase chain reaction mixtures to conditions suitable for two or more polymerase chain reaction cycles comprising a denaturation treatment, a hybridization treatment, and an extension treatment, thereby forming first polymerase chain reaction products comprising a 5′ primer-specific portion of the first secondary oligonucleotide primer, a nucleotide sequence corresponding to the target miRNA molecule sequence or a complement thereof, and a complement of the other 5′ primer-specific portion second secondary oligonucleotide primer;
providing one or more tertiary oligonucleotide primer sets, each tertiary oligonucleotide primer set comprising (a) a first tertiary oligonucleotide primer comprising the same nucleotide sequence as the 5′ primer-specific portion of the first polymerase chain reaction products or their complements and (b) a second tertiary oligonucleotide primer comprising a nucleotide sequence that is complementary to the 3′ primer-specific portion of the first polymerase chain reaction products or their complements;
blending the first polymerase chain reaction process products, the one or more tertiary oligonucleotide primer sets, the one or more enzymes capable of digesting deoxyuracil (dU)-containing nucleic acid molecules, a deoxynucleotide mix including dUTP, and a DNA polymerase to form one or more second polymerase chain reaction mixtures;
subjecting the one or more second polymerase chain reaction mixtures to conditions suitable for digesting deoxyuracil (dU) containing nucleic acid molecules present in the second polymerase chain reaction mixtures and for carrying out one or more polymerase chain reaction cycles comprising a denaturation treatment, a hybridization treatment, and an extension treatment thereby forming second polymerase chain reaction products; and
detecting and distinguishing the second polymerase chain reaction products, thereby identifying one or more target miRNA molecules differing in sequence from other miRNA molecules in the sample by one or more bases.

21. A method for identifying, in a sample, one or more target micro-ribonucleic acid (miRNA) molecules differing in sequence from other miRNA molecules in the sample by one or more bases, said method comprising:
providing a sample containing one or more target miRNA molecules potentially differing in sequence from other miRNA molecules in the sample by one or more bases;
providing one or more enzymes capable of digesting deoxyuracil (dU)-containing nucleic acid molecules present in the sample;
contacting the sample with one or more enzymes capable of digesting dU-containing nucleic acid molecules potentially present in the sample;
blending the contacted sample with ATP and a Poly(A) polymerase to form a Poly(A) polymerase reaction mixture;
subjecting the Poly(A) polymerase reaction mixture to conditions suitable for appending homopolymer A to the 3′ ends of the one or more target miRNA molecules potentially present in the sample;
providing one or more primary oligonucleotide primer sets, each primer set comprising (a) a first primary oligonucleotide primer comprising a 5′ primer-specific portion, an internal poly dT portion, and a 3′ portion comprising from 1 to 10 bases complementary to the 3′ end of the target miRNA, wherein the first primary oligonucleotide primer may be the same or may differ from other first primary oligonucleotide primers in other sets, and (b) a second primary oligonucleotide primer comprising a 5′ primer-specific portion and a 3′ portion, wherein the second primary oligonucleotide primer may be the same or may differ from other second primary oligonucleotide primers in other sets;
blending the Poly(A) polymerase reaction mixture, the one or more primary oligonucleotide primer sets, the one or more enzymes capable of digesting deoxyuracil (dU)-containing nucleic acid molecules in the sample, a deoxynucleotide mix including dUTP, and a reverse transcriptase and a DNA polymerase or a DNA polymerase with reverse-transcriptase activity to form one or more reverse-transcription/polymerase chain reaction mixtures;
subjecting the one or more reverse-transcription/polymerase chain reaction mixtures to conditions suitable for digesting deoxyuracil (dU)-containing nucleic acid molecules present in the reverse-transcription/polymerase chain reaction mixtures, then to conditions suitable for generating complementary deoxyribonucleic acid (cDNA) molecules to the target miRNA sequences with 3′ polyA tails, and to one or more polymerase chain reaction cycles comprising a denaturation treatment, a hybridization treatment, and an extension treatment thereby forming one or more different reverse-transcription/polymerase chain reaction products comprising the 5′ primer-specific portion of the second primary oligonucleotide primer, a nucleotide sequence corresponding to the target miRNA molecule sequence, a poly dA region, and the complement of the 5′ primer-specific portion of the first primary oligonucleotide primer, and complements thereof;
providing one or more oligonucleotide probe sets, each probe set comprising (a) a first oligonucleotide probe having a 5′ primer-specific portion and a 3′ target sequence-specific portion, and (b) a second oligonucleotide probe having a 5′ target sequence-specific portion, a portion complementary to the one or more reverse-transcription/polymerase chain reaction products, and a 3′ primer-specific portion, wherein the first and second oligonucleotide probes of a probe set are configured to hybridize, in a base specific manner, to complementary portions of the one or more reverse-transcription/polymerase chain reaction products corresponding to the target miRNA molecule sequence, or complement thereof;
contacting the one or more reverse-transcription/polymerase chain reaction products with a ligase and the one or more oligonucleotide probe sets to form one or more ligation reaction mixtures;
subjecting the one or more ligation reaction mixtures to one or more ligation reaction cycles whereby the first and second oligonucleotide probes of the one or more oligonucleotide probe sets, when hybridized to their complement, are ligated together to form ligated product sequences in the ligation reaction mixture, wherein each ligated product sequence comprises the 5′ primer-specific portion, the target-specific portions, and the 3′ primer-specific portion;
providing one or more secondary oligonucleotide primer sets, each secondary oligonucleotide primer set comprising (a) a first secondary oligonucleotide primer comprising the same nucleotide sequence as the 5′ primer-specific portion of the ligated product sequence and (b) a second secondary oligonucleotide primer comprising a nucleotide sequence that is complementary to the 3′ primer-specific portion of the ligated product sequence;
blending the ligated product sequences and the one or more secondary oligonucleotide primer sets, with one or more enzymes capable of digesting deoxyuracil (dU)-containing nucleic acid molecules, a deoxynucleotide mix including dUTP, and a DNA polymerase to form one or more first polymerase chain reaction mixtures;
subjecting the one or more first polymerase chain reaction mixtures to conditions suitable for digesting deoxyuracil (dU)-containing nucleic acid molecules present in the first polymerase chain reaction mixtures and for carrying out one or more polymerase chain reaction cycles comprising a denaturation treatment, a hybridization treatment, and an extension treatment thereby forming secondary polymerase chain reaction products; and
detecting and distinguishing the secondary polymerase chain reaction products, thereby identifying one or more target miRNA molecules differing in sequence from other miRNA molecules in the sample by one or more bases.

22. A method for identifying, in a sample, one or more target micro-ribonucleic acid (miRNA) molecules differing in sequence from other miRNA molecules in the sample by one or more bases, said method comprising:
providing a sample containing one or more target miRNA molecules potentially differing in sequence from other miRNA molecules in the sample by one or more bases;
providing one or more enzymes capable of digesting deoxyuracil (dU)-containing nucleic acid molecules present in the sample;
contacting the sample with one or more enzymes capable of digesting dU-containing nucleic acid molecules potentially present in the sample;
blending the contacted sample with ATP and a Poly(A) polymerase to form a Poly(A) polymerase reaction mixture;
subjecting the Poly(A) polymerase reaction mixture to conditions suitable for appending a homopolymer A to the 3′ ends of the one or more target miRNA molecules potentially present in the sample;
providing one or more primary oligonucleotide primer sets, each primer set comprising (a) a first primary oligonucleotide primer comprising a 5′ primer-specific portion, an internal poly dT portion, and a 3′ portion comprising from 1 to 10 bases complementary to the 3′ end of the target miRNA, wherein the first primary oligonucleotide primer may be the same or may differ from other first primary oligonucleotide primers in other sets, and (b) a second primary oligonucleotide primer comprising a 5′ primer-specific portion and a 3′ portion, wherein the second primary oligonucleotide primer may be the same or may differ from other second primary oligonucleotide primers in other sets;
blending the Poly(A) polymerase reaction mixture potentially comprising target miRNA sequences with 3′ polyA tails, the one or more primary oligonucleotide primer sets, a deoxynucleotide mix, and a reverse transcriptase and a DNA polymerase or a DNA polymerase with reverse-transcriptase activity to form one or more reverse-transcription/polymerase chain reaction mixtures;
subjecting the one or more reverse-transcription/polymerase chain reaction mixtures to conditions suitable for generating complementary deoxyribonucleic acid (cDNA) molecules to the target miRNA sequences with 3′ polyA tails, and to one or more polymerase chain reaction cycles comprising a denaturation treatment, a hybridization treatment, and an extension treatment, thereby forming one or more different reverse-transcription/polymerase chain reaction products comprising the 5′ primer-specific portion of the second primary oligonucleotide primer, a nucleotide sequence corresponding to the target miRNA molecule sequence, a poly dA region, and the complement of the 5′ primer-specific portion of the first primary oligonucleotide primer, and complements thereof;
providing one or more secondary oligonucleotide primer sets, each secondary oligonucleotide primer set comprising (a) a first secondary oligonucleotide primer having a 5′ primer-specific portion and a 3′ portion that is complementary to a portion of a reverse-transcription/polymerase chain reaction product formed from the first primary oligonucleotide primer and (b) a second secondary oligonucleotide primer having a 5′ primer-specific portion and a 3′ portion that comprises a nucleotide sequence that is complementary to a portion of a reverse-transcription/polymerase chain reaction product formed from the first secondary oligonucleotide primer;
blending the reverse-transcription/polymerase chain reaction products, the one or more secondary oligonucleotide primer sets, a deoxynucleotide mix, and a DNA polymerase to form one or more first polymerase chain reaction mixtures;
subjecting the one or more first polymerase chain reaction mixtures to conditions suitable for two or more polymerase chain reaction cycles comprising a denaturation treatment, a hybridization treatment, and an extension treatment, thereby forming first polymerase chain reaction products comprising a 5′ primer-specific portion, a nucleotide sequence corresponding to the target miRNA molecule sequence or a complement thereof; and a complement of the other 5′ primer-specific portion;
providing one or more tertiary oligonucleotide primer sets, each tertiary oligonucleotide primer set comprising (a) a first tertiary oligonucleotide primer comprising the same nucleotide sequence as the 5′ primer-specific portion of the first polymerase chain reaction product sequence and (b) a second tertiary oligonucleotide primer comprising a nucleotide sequence that is complementary to the 3′ primer-specific portion of the first polymerase chain reaction product sequence;
blending the first polymerase chain reaction products, the one or more tertiary oligonucleotide primer sets, the one or more enzymes capable of digesting deoxyuracil (dU) containing nucleic acid molecules, a deoxynucleotide mix including dUTP, and a DNA polymerase to form one or more second polymerase chain reaction mixtures;
subjecting the one or more second polymerase chain reaction mixtures to conditions suitable for digesting deoxyuracil (dU)-containing nucleic acid molecules present in the first polymerase chain reaction mixtures, and one or more polymerase chain reaction cycles comprising a denaturation treatment, a hybridization treatment, and an extension treatment thereby forming second polymerase chain reaction products; and
detecting and distinguishing the second polymerase chain reaction products in the one or more reactions thereby identifying one or more target miRNA molecules differing in sequence from other miRNA molecules in the sample by one or more bases.

23. The method of any one of claims 19 through 22 wherein the 3′ portion of the second primary oligonucleotide primer comprises ribo-G and/or G nucleotide analogue, wherein the reverse transcriptase appends two or three cytosine nucleotides to the 3′ end of the complementary deoxyribonucleic acid products of the target miRNAs, enabling transient hybridization to the 3′ end of the second primary oligonucleotide primer, enabling the reverse transcriptase to undergo strand switching and to extend the complementary deoxyribonucleic acid products to include the complementary sequence of the 5′ primer-specific portion of the second primary oligonucleotide primer to form the one or more different first polymerase chain reaction products comprising a 5′ primer-specific portion, a nucleotide sequence portion corresponding to the target miRNA molecule sequence or a complement thereof, a further portion, and a complement of the other 5′ primer-specific portion.

24. The method of any one of claims 19 through 22 wherein the 3′ portion of the second primary oligonucleotide primers contains from 6 to 14 bases comprising, from 5′ to 3′, three ribo-G or G bases, followed by additional bases that are the same as the 5′ end of the target miRNA sequences, wherein the reverse transcriptase appends two or three cytosine residues to the 3′ end of the initial complementary deoxyribonucleic acid extension products of the target miRNAs, and wherein subsequent to when the denaturation treatment of the polymerase chain reaction is initiated the conditions are adjusted to enable transient hybridization to the 3′ end of the second primary oligonucleotide primers to the 3′ end of the complementary deoxyribonucleic acid extension products, allowing for extension of either one or both the second primary oligonucleotide primers and the complementary deoxyribonucleic acid extension products to form the one or more different primary reverse-transcription/polymerase chain reaction products comprising a 5′ primer-specific portion, a nucleotide sequence portion corresponding to the target miRNA molecule sequence or a complement thereof, a further portion, and a complement of the other 5′ primer-specific portion.

25. The method of any one of claim 1, 4, or 17, wherein the second oligonucleotide probe of the oligonucleotide probe set further comprises a unitaq detection portion, thereby forming ligated product sequences comprising the 5′ primer-specific portion, the target-specific portions, the unitaq detection portion, and the 3′ primer-specific portion, said method further comprising:
providing one or more unitaq detection probes, wherein each unitaq detection probe hybridizes to a complementary unitaq detection portion and said detection probe comprises a quencher molecule and a detectable label separated from the quencher molecule;
adding the one or more unitaq detection probes to the second polymerase chain reaction mixture; and
hybridizing the one or more unitaq detection probes to complementary unitaq detection portions on the ligated product sequence or complement thereof during said subjecting the second polymerase chain reaction mixture to conditions suitable for one or more polymerase chain reaction cycles, wherein the quencher molecule and the detectable label are cleaved from the one or more unitaq detection probes during the extension treatment and said detecting involves the detection of the cleaved detectable label.

26. The method of any one of claim 2, 3, 5, 6, 7, or 18, wherein one primary oligonucleotide primer or one secondary oligonucleotide primer further comprises a unitaq detection portion, thereby forming extension product sequences comprising the 5′ primer-specific portion, the target-specific portions, the unitaq detection portion, and the complement of the other 5′ primer-specific portion, and complements thereof, said method further comprising:
providing one or more unitaq detection probes, wherein each unitaq detection probe hybridizes to a complementary unitaq detection portion and said detection probe comprises a quencher molecule and a detectable label separated from the quencher molecule;
adding the one or more unitaq detection probes to the one or more first or second polymerase chain reaction mixtures; and
hybridizing the one or more unitaq detection probes to complementary unitaq detection portions on the ligated product sequence or complement thereof during polymerase chain reaction cycles after the first polymerization chain reaction, wherein the quencher molecule and the detectable label are cleaved from the one or more unitaq detection probes during the extension treatment and said detecting involves the detection of the cleaved detectable label.

27. The method of any one of claim 1, 4, 17, 19, or 21, wherein one or both oligonucleotide probes of the oligonucleotide probe set comprises a portion that has no or one nucleotide sequence mismatch when hybridized in a base-specific manner to the target nucleic acid sequence or bisulfite-converted methylated nucleic acid sequence or complement sequence thereof, but have one or more additional nucleotide sequence mismatches that interferes with ligation when said oligonucleotide probe hybridizes in a base-specific manner to a corresponding nucleotide sequence portion in the wildtype nucleic acid sequence or bisulfite-converted unmethylated nucleic acid sequence or complement sequence thereof.

28. The method of any one of claim 1, 4, or 17, wherein the 3′ portion of the first oligonucleotide probe of the oligonucleotide probe set comprises a cleavable nucleotide or nucleotide analogue and a blocking group, such that the 3′ end is unsuitable for polymerase extension or ligation, said method further comprising;
cleaving the cleavable nucleotide or nucleotide analog of the first oligonucleotide probe when said probe is hybridized to it complementary target nucleotide sequence of the primary extension product, thereby liberating a 3′OH on the first oligonucleotide probe prior to said ligating.

29. The method of claim 28, wherein the one or more first oligonucleotide probe of the oligonucleotide probe set comprises a sequence that differs from the target nucleic acid sequence or bisulfite-converted methylated nucleic acid sequence or complement sequence thereof, said difference is located two or three nucleotide bases from the liberated free 3′OH end.

30. The method of any one of claim 1, 4, or 17, wherein the second oligonucleotide probe has, at its 5′ end, an overlapping identical nucleotide with the 3′ end of the first oligonucleotide probe, and, upon hybridization of the first and second oligonucleotide probes of a probe set at adjacent positions on a complementary target nucleotide sequence of a primary extension product to form a junction, the overlapping identical nucleotide of the second oligonucleotide probe forms a flap at the junction with the first oligonucleotide probe, said method further comprising:
cleaving the overlapping identical nucleotide of the second oligonucleotide probe with an enzyme having 5′ nuclease activity thereby liberating a phosphate at the 5′ end of the second oligonucleotide probe prior to said ligating.

31. The method of any one of claim 1, 4, or 17, wherein the one or more oligonucleotide probe sets further comprise a third oligonucleotide probe having a target-specific portion, wherein the second and third oligonucleotide probes of a probe set are configured to hybridize adjacent to one another on the target nucleotide sequence with a junction between them to allow ligation between the second and third oligonucleotide probes to form a ligated product sequence comprising the first, second, and third oligonucleotide probes of a probe set.

32. The method of any one of claims 1 through 31, wherein the sample is selected from the group consisting of tissue, cells, serum, blood, plasma, amniotic fluid, sputum, urine, bodily fluids, bodily secretions, bodily excretions, cell-free circulating nucleic acids, cell-free circulating tumor nucleic acids, cell-free circulating fetal nucleic acids in pregnant woman, circulating tumor cells, tumor, tumor biopsy, and exosomes.

33. The method of any one of claims 1 through 31, wherein the one or more target nucleotide sequences are low-abundance nucleic acid molecules comprising one or more nucleotide base mutations, insertions, deletions, translocations, splice variants, miRNA variants, alternative transcripts, alternative start sites, alternative coding sequences, alternative non-coding sequences, alternative splicings, exon insertions, exon deletions, intron insertions, or other rearrangement at the genome level and/or methylated nucleotide bases.

34. The method of claim 33, wherein the low-abundance nucleic acid molecules with one or more nucleotide base mutations, insertions, deletions, translocations, splice variants, miRNA variants, alternative transcripts, alternative start sites, alternative coding sequences, alternative non-coding sequences, alternative splicings, exon insertions, exon deletions, intron insertions, or other rearrangement at the genome level, and/or methylated nucleotide bases are identified and distinguished from a high-abundance of nucleic acid molecules in the sample having a similar nucleotide sequence as the low abundance nucleic acid molecules but without the one or more nucleotide base mutations, insertions, deletions, translocations, splice variants, miRNA variants, alternative transcripts, alternative start sites, alternative coding sequences, alternative non-coding sequences, alternative splicings, exon insertions, exon deletions, intron insertions, or other rearrangement at the genome level, and/or methylated nucleotide bases.

35. The method of claim 34, wherein the copy number of one or more low-abundance target nucleotide sequences are quantified relative to the copy number of the high-abundance nucleic acid molecules in the sample.

36. The method of any one of claims 1 through 31, wherein the one or more target nucleotide sequences are quantified or enumerated.

37. The method of claim 36, wherein the one or more target nucleotide sequences are quantified or enumerated relative to other nucleotide sequences in the sample or other samples undergoing the identical subsequent steps.

38. The method of claim 37, wherein the relative copy number of one or more target nucleotide sequences are quantified or enumerated.

39. The method of any one of claims 1 through 31 further comprising:
diagnosing or prognosing a disease state based on said identifying.

40. The method of any one of claims 1 through 31 further comprising:
distinguishing a genotype or disease predisposition based on said identifying.

41. A method of diagnosing or prognosing a disease state of cells or tissue based on identifying the presence or level of a plurality of disease-specific and/or cell/tissue-specific DNA, RNA, and/or protein markers in a biological sample of an individual, wherein the plurality of markers is in a set comprising from 6-12 markers, 12-24 markers, 24-36 markers, 36-48 markers, 48-72 markers, 72-96 markers, or >96 markers, wherein each marker in a given set is selected by having any one or more of the following criteria:
present, or above a cutoff level, in >50% of biological samples of the disease cells or tissue from individuals diagnosed with the disease state;
absent, or below a cutoff level, in >95% of biological samples of the normal cells or tissue from individuals without the disease state;
present, or above a cutoff level, in >50% of biological samples comprising cells, serum, blood, plasma, amniotic fluid, sputum, urine, bodily fluids, bodily secretions, bodily excretions, or fractions thereof, from individuals diagnosed with the disease state;
absent, or below a cutoff level, in >95% of biological samples comprising cells, serum, blood, plasma, amniotic fluid, sputum, urine, bodily fluids, bodily secretions, bodily excretions, or fractions thereof, from individuals without the disease state;
present with a z-value of >1.65 in the biological sample comprising cells, serum, blood, plasma, amniotic fluid, sputum, urine, bodily fluids, bodily secretions, bodily excretions, or fractions thereof, from individuals diagnosed with the disease state;
and, wherein at least 50% of the markers in a set each comprise one or more methylated residues, and/or wherein at least 50% of the markers in a set that are present, or above a cutoff level, or present with a z-value of >1.65, comprise of one or more methylated residues, in the biological sample comprising cells, serum, blood, plasma, amniotic fluid, sputum, urine, bodily fluids, bodily secretions, bodily excretions, or fractions thereof, from at least 50% of individuals diagnosed with the disease state, said method comprising:
obtaining a biological sample including cell-free DNA, RNA, and/or protein originating from the cells or tissue and from one or more other tissues or cells, wherein the biological sample is selected from the group consisting of cells, serum, blood, plasma, amniotic fluid, sputum, urine, bodily fluids, bodily secretions, and bodily excretions, or fractions thereof;
fractionating the sample into one or more fractions, wherein at least one fraction comprises exosomes, tumor-associated vesicles, other protected states, or cell-free DNA, RNA, and/or protein;
subjecting nucleic acid molecules in the one or more fractions to a bisulfite treatment under conditions suitable to convert unmethylated cytosine residues to uracil residues;
carrying out at least two enrichment steps for 50% or more disease-specific and/or cell/tissue-specific DNA, RNA, and/or protein markers during either said fractionating and/or by carrying out a nucleic acid amplification step; and
performing one or more assays to detect and distinguish the plurality of disease-specific and/or cell/tissue-specific DNA, RNA, and/or protein markers, thereby identifying their presence or levels in the sample, wherein individuals are diagnosed or prognosed with the disease state if a minimum of 2 or 3 markers are present or are above a cutoff level in a marker set comprising from 6-12 markers; or a minimum of 3, 4, or 5 markers are present or are above a cutoff level in a marker set comprising from 12-24 markers; or a minimum of 3, 4, 5, or 6 markers are present or are above a cutoff level in a marker set comprising from 24-36 markers; or a minimum of 4, 5, 6, 7, or 8 markers are present or are above a cutoff level in a marker set comprising from 36-48 markers; or a minimum of 6, 7, 8, 9, 10, 11, or 12 markers are present or are above a cutoff level in a marker set comprising from 48-72 markers, or a minimum of 7, 8, 9, 10, 11, 12 or 13 markers are present or are above a cutoff level in a marker set comprising from 72-96 markers, or a minimum of 8, 9, 10, 11, 12, 13 or “n”/12 markers are present or are above a cutoff level in a marker set comprising 96−“n” markers, when “n”>168 markers.

42. A method of diagnosing or prognosing a disease state of a solid tissue cancer including colorectal adenocarcinoma, stomach adenocarcinoma, esophageal carcinoma, breast lobular and ductal carcinoma, uterine corpus endometrial carcinoma, ovarian serous cystadenocarcinoma, cervical squamous cell carcinoma and adenocarcinoma, uterine carcinosarcoma, lung adenocarcinoma, lung squamous cell carcinoma, head & neck squamous cell carcinoma, prostate adenocarcinoma, invasive urothelial bladder cancer, liver hepatoceullular carcinoma, pancreatic ductal adenocarcinoma, or gallbladder adenocarcinoma, based on identifying the presence or level of a plurality of disease-specific and/or cell/tissue-specific DNA, RNA, and/or protein markers in a biological sample of an individual, wherein the plurality of markers is in a set comprising from 48-72 total cancer markers, 72-96 total cancer markers or ≥96 total cancer markers, wherein on average greater than one quarter such markers in a given set cover each of the aforementioned major cancers being tested, wherein each marker in a given set for a given solid tissue cancer is selected by having any one or more of the following criteria for that solid tissue cancer:
present, or above a cutoff level, in >50% of biological samples of a given cancer tissue from individuals diagnosed with a given solid tissue cancer;
absent, or below a cutoff level, in >95% of biological samples of the normal tissue from individuals without that given solid tissue cancer;
present, or above a cutoff level, in >50% of biological samples comprising cells, serum, blood, plasma, amniotic fluid, sputum, urine, bodily fluids, bodily secretions, bodily excretions, or fractions thereof, from individuals diagnosed with a given solid tissue cancer;
absent, or below a cutoff level, in >95% of biological samples comprising cells, serum, blood, plasma, amniotic fluid, sputum, urine, bodily fluids, bodily secretions, bodily excretions, or fractions thereof, from individuals without that given solid tissue cancer;
present with a z-value of >1.65 in the biological sample comprising cells, serum, blood, plasma, amniotic fluid, sputum, urine, bodily fluids, bodily secretions, bodily excretions, or fractions thereof, from individuals diagnosed with a given solid tissue cancer;
and, wherein at least 50% of the markers in a set each comprise one or more methylated residues, and/or wherein at least 50% of the markers in a set that are present, or above a cutoff level, or present with a z-value of >1.65, comprise of one or more methylated residues, in the biological sample comprising cells, serum, blood, plasma, amniotic fluid, sputum, urine, bodily fluids, bodily secretions, bodily excretions, or fractions thereof, from at least 50% of individuals diagnosed with a given solid tissue cancer, said method comprising:
obtaining a biological sample including cell-free DNA, RNA, and/or protein originating from the cells or tissue and from one or more other tissues or cells, wherein the biological sample is selected from the group consisting of cells, serum, blood, plasma, amniotic fluid, sputum, urine, bodily fluids, bodily secretions, and bodily excretions, or fractions thereof;
fractionating the sample into one or more fractions, wherein at least one fraction comprises exosomes, tumor-associated vesicles, other protected states, or cell-free DNA, RNA, and/or protein;
subjecting the nucleic acid molecules in the one or more fractions to a bisulfite treatment under conditions suitable to convert unmethylated cytosine residues to uracil residues;
carrying out at least two enrichment steps for 50% or more of the given solid tissue cancer-specific and/or cell/tissue-specific DNA, RNA, and/or protein markers during either said fractionating and/or by carrying out a nucleic acid amplification step; and
performing one or more assays to detect and distinguish the plurality of cancer-specific and/or cell/tissue-specific DNA, RNA, and/or protein markers, thereby identifying their presence or levels in the sample, wherein individuals are diagnosed or prognosed with the a solid-tissue cancer if a minimum of 4 markers are present or are above a cutoff level in a marker set comprising from 48-72 total cancer markers; or a minimum of 5 markers are present or are above a cutoff level in a marker set comprising from 72-96 total cancer markers; or a minimum of 6 or “n”/18 markers are present or are above a cutoff level in a marker set comprising 96 to “n” total cancer markers, when “n”>96 total cancer markers.

43. The method of claim 42, wherein each marker in a given set for a given solid tissue cancer is selected by having any one or more of the following criteria for that solid tissue cancer:
present, or above a cutoff level, in >66% of biological samples of a given cancer tissue from individuals diagnosed with a given solid tissue cancer;
absent, or below a cutoff level, in >95% of biological samples of the normal tissue from individuals without that given solid tissue cancer;
present, or above a cutoff level, in >66% of biological samples comprising cells, serum, blood, plasma, amniotic fluid, sputum, urine, bodily fluids, bodily secretions, bodily excretions, or fractions thereof, from individuals diagnosed with a given solid tissue cancer;
absent, or below a cutoff level, in >95% of biological samples comprising cells, serum, blood, plasma, amniotic fluid, sputum, urine, bodily fluids, bodily secretions, bodily excretions, or fractions thereof, from individuals without that given solid tissue cancer;
present with a z-value of >1.65 in the biological sample comprising cells, serum, blood, plasma, amniotic fluid, sputum, urine, bodily fluids, bodily secretions, bodily excretions, or fractions thereof, from individuals diagnosed with a given solid tissue cancer.

44. A method of diagnosing or prognosing a disease state of and identifying the most likely specific tissue(s) of origin of a solid tissue cancer in the following groups: Group 1 (colorectal adenocarcinoma, stomach adenocarcinoma, esophageal carcinoma); Group 2 (breast lobular and ductal carcinoma, uterine corpus endometrial carcinoma, ovarian serous cystadenocarcinoma, cervical squamous cell carcinoma and adenocarcinoma, uterine carcinosarcoma); Group 3 (lung adenocarcinoma, lung squamous cell carcinoma, head & neck squamous cell carcinoma); Group 4 (prostate adenocarcinoma, invasive urothelial bladder cancer); and/or Group 5 (liver hepatoceullular carcinoma, pancreatic ductal adenocarcinoma, or gallbladder adenocarcinoma) based on identifying the presence or level of a plurality of disease-specific and/or cell/tissue-specific DNA, RNA, and/or protein markers in a biological sample of an individual, wherein the plurality of markers is in a set comprising from 36-48 group-specific cancer markers, 48-64 group-specific cancer markers, or 64 group-specific cancer markers, wherein on average greater than one third of such markers in a given set cover each of the aforementioned cancers being tested within that group, wherein each marker in a given set for a given solid tissue cancer is selected by having any one or more of the following criteria for that solid tissue cancer:
present, or above a cutoff level, in >50% of biological samples of a given cancer tissue from individuals diagnosed with a given solid tissue cancer;
absent, or below a cutoff level, in >95% of biological samples of the normal tissue from individuals without that given solid tissue cancer;
present, or above a cutoff level, in >50% of biological samples comprising cells, serum, blood, plasma, amniotic fluid, sputum, urine, bodily fluids, bodily secretions, bodily excretions, or fractions thereof, from individuals diagnosed with a given solid tissue cancer;
absent, or below a cutoff level, in >95% of biological samples comprising cells, serum, blood, plasma, amniotic fluid, sputum, urine, bodily fluids, bodily secretions, bodily excretions, or fractions thereof, from individuals without that given solid tissue cancer;
present with a z-value of >1.65 in the biological sample comprising cells, serum, blood, plasma, amniotic fluid, sputum, urine, bodily fluids, bodily secretions, bodily excretions, or fractions thereof, from individuals diagnosed with a given solid tissue cancer;
and, wherein at least 50% of the markers in a set each comprise one or more methylated residues, and/or wherein at least 50% of the markers in a set that are present, or above a cutoff level, or present with a z-value of >1.65 comprise one or more methylated residues, in the biological sample comprising cells, serum, blood, plasma, amniotic fluid, sputum, urine, bodily fluids, bodily secretions, bodily excretions, or fractions thereof, from at least 50% of individuals diagnosed with a given solid tissue cancer, said method comprising:
obtaining the biological sample, the biological sample including cell-free DNA, RNA, and/or protein originating from the cells or tissue and from one or more other tissues or cells, wherein the biological sample is selected from the group consisting of cells, serum, blood, plasma, amniotic fluid, sputum, urine, bodily fluids, bodily secretions, bodily excretions, or fractions thereof;
fractionating the sample into one or more fractions, wherein at least one fraction comprises exosomes, tumor-associated vesicles, other protected states, or cell-free DNA, RNA, and/or protein;
subjecting the nucleic acid molecules in the one or more fractions to a bisulfite treatment under conditions suitable to convert unmethylated cytosine residues to uracil residues;
carrying out at least two enrichment steps for 50% or more of the given solid tissue cancer-specific and/or cell/tissue-specific DNA, RNA, and/or protein markers during either said fractionating and/or by carrying out a nucleic acid amplification step; and
performing one or more assays to detect and distinguish the plurality of cancer-specific and/or cell/tissue-specific DNA, RNA, and/or protein markers, thereby identifying their presence or levels in the sample, wherein individuals are diagnosed or prognosed with a solid-tissue cancer if a minimum of 4 markers are present or are above a cutoff level in a marker set comprising from 36-48 group-specific cancer markers; or a minimum of 5 markers are present or are above a cutoff level in a marker set comprising from 48-64 group-specific cancer markers; or
a minimum of 6 or “n”/12 markers are present or are above a cutoff level in a marker set comprising 64 to “n” total cancer markers, when “n”>64 group-specific cancer markers.

45. The method of claim 44, wherein each marker in a given set for a given solid tissue cancer is selected by having any one or more of the following criteria for that solid tissue cancer:
present, or above a cutoff level, in >66% of biological samples of a given cancer tissue from individuals diagnosed with a given solid tissue cancer;
absent, or below a cutoff level, in >95% of biological samples of the normal tissue from individuals without that given solid tissue cancer;
present, or above a cutoff level, in >66% of biological samples comprising cells, serum, blood, plasma, amniotic fluid, sputum, urine, bodily fluids, bodily secretions, bodily excretions, or fractions thereof, from individuals diagnosed with a given solid tissue cancer;
absent, or below a cutoff level, in >95% of biological samples comprising cells, serum, blood, plasma, amniotic fluid, sputum, urine, bodily fluids, bodily secretions, bodily excretions, or fractions thereof, from individuals without that given solid tissue cancer;
present with a z-value of >1.65 in the biological sample comprising cells, serum, blood, plasma, amniotic fluid, sputum, urine, bodily fluids, bodily secretions, bodily excretions, or fractions thereof, from individuals diagnosed with a given solid tissue cancer.

46. The method of any one of claims 41 through 45, wherein the at least two enrichment steps comprise of two or more of the following steps:
capturing or separating exosomes or extracellular vesicles or markers in other protected states; capturing or separating a platelet fraction; capturing or separating circulating tumor cells; capturing or separating RNA-containing complexes; capturing or separating cfDNA-nucleosome or differentially modified cfDNA-histone complexes; capturing or separating protein targets or protein target complexes; capturing or separating auto-antibodies; capturing or separating cytokines; capturing or separating methylated cfDNA; capturing or separating marker specific DNA, cDNA, miRNA, lncRNA, ncRNA, or mRNA, or amplified complements, by hybridization to complementary capture probes in solution, on magnetic beads, or on a microarray; amplifying miRNA markers, non-coding RNA markers (lncRNA & ncRNA markers), mRNA markers, exon markers, splice-variant markers, translocation markers, or copy number variation markers in a linear or exponential manner via a polymerase extension reaction, polymerase chain reaction, bisulfite-methyl-specific polymerase chain reaction, reverse-transcription reaction, bisulfite-methyl-specific ligation reaction, and/or ligation reaction, using DNA polymerase, reverse transcriptase, DNA ligase, RNA ligase, DNA repair enzyme, RNase, RNaseH2, endonuclease, restriction endonuclease, exonuclease, CRISPR, DNA glycosylase or combinations thereof; selectively amplifying one or more target regions containing mutation markers or bisulfite-converted DNA methylation markers, while suppressing amplification of the target regions containing wild-type sequence or bisulfite-converted unmethylated sequence or complement sequence thereof, in a linear or exponential manner via a polymerase extension reaction, polymerase chain reaction, bisulfite-methyl-specific polymerase chain reaction, reverse-transcription reaction, bisulfite-methyl-specific ligation reaction, and/or ligation reaction, using DNA polymerase, reverse transcriptase, DNA ligase, RNA ligase, DNA repair enzyme, RNase, RNaseH2, endonuclease, restriction endonuclease, exonuclease, CRISPR, DNA glycosylase or combinations thereof; preferentially extending, ligating, or amplifying one or more primers or probes whose 3′-OH end has been liberated in an enzyme and sequence-dependent process; using one or more blocking oligonucleotide primers comprising one or more mismatched bases at the 3′ end or comprising one or more nucleotide analogs and a blocking group at the 3′ end under conditions that interfere with polymerase extension or ligation during said reaction of target-specific primer or probes hybridized in a base-specific manner to wildtype sequence or bisulfite-converted unmethylated sequence or complement sequence thereof.

47. The method of any one of claims 41 through 46, wherein the one or more assays to detect and distinguish the plurality of disease-specific and/or cell/tissue-specific DNA, RNA, or protein markers comprise one or more of the following:
a quantitative real-time PCR method (qPCR); a reverse transcriptase-polymerase chain reaction (RTPCR) method; a bisulfite qPCR method; a digital PCR method (dPCR); a bisulfite dPCR method; a ligation detection method, a ligase chain reaction, a restriction endonuclease cleavage method; a DNA or RNA nuclease cleavage method; a micro-array hybridization method; a peptide-array binding method; an antibody-array method; a mass spectrometry method; a liquid chromatography-tandem mass spectrometry (LC-MS/MS) method; a capillary or gel electrophoresis method; a chemiluminescence method; a fluorescence method; a DNA sequencing method; a bisulfite conversion-DNA sequencing method; an RNA sequencing method; a proximity ligation method; a proximity PCR method; a method comprising immobilizing an antibody-target complex; a method comprising immobilizing an aptamer-target complex; an immunoassay method; a method comprising a Western blot assay; a method comprising an enzyme linked immunosorbent assay (ELISA); a method comprising a high-throughput microarray-based enzyme-linked immunosorbent assay (ELISA); or a method comprising a high-throughput flow-cytometry-based enzyme-linked immunosorbent assay (ELISA).

48. The method of any one of claims 41 through 47, wherein the one or more cutoff levels of the one or more assays to detect and distinguish the plurality of disease-specific and/or cell/tissue-specific DNA, RNA, or protein markers comprise one or more of the following calculations, comparisons, or determinations, in the one or more marker assays comparing samples from the disease vs. normal individual:
marker ΔCt value is >2; marker ΔCt value is >4; ratio of detected marker-specific signal is >1.5; ratio of detected marker-specific signal is >3; ratio of marker concentrations is >1.5; ratio of marker concentrations is >3; enumerated marker-specific signals differ by >20%; enumerated marker-specific signals differ by >50%; marker-specific signal from a given disease sample is >85%; >90%; >95%; >96%; >97%; or >98% of the same marker-specific signals from a set of normal samples; or marker-specific signal from a given disease sample has a z-score of >1.03; >1.28; >1.65; >1.75; >1.88; or >2.05 compared to the same marker-specific signals from a set of normal samples.

49. A two-step method of diagnosing or prognosing a disease state of cells or tissue based on identifying the presence or level of a plurality of disease-specific and/or cell/tissue-specific DNA, RNA, and/or protein markers in a biological sample of an individual, said two-step method comprising:
obtaining a biological sample, the biological sample including exosomes, tumor-associated vesicles, markers within other protected states, cell-free DNA, RNA, and/or protein originating from the potentially disease state cells or tissue and from one or more other tissues or cells, wherein the biological sample is selected from the group consisting of cells, serum, blood, plasma, amniotic fluid, sputum, urine, bodily fluids, bodily secretions, and bodily excretions, or fractions thereof;
applying a first step to the biological samples with an overall sensitivity of >80% and an overall specificity of >90% or an overall Z-score of >1.28 to identify individuals more likely to be diagnosed or prognosed with the disease state; and
applying a second step to biological samples from those individuals identified in the first step with an overall specificity of >95% or an overall Z-score of >1.65 to diagnose or prognose individuals with the disease state, wherein said applying the first step and/or said applying the second step is carried out using the method of one of claims 41-44.

50. The method of any one of claims 41 through 49, wherein the disease state is a solid tissue cancer including colorectal adenocarcinoma, stomach adenocarcinoma, esophageal carcinoma, breast lobular and ductal carcinoma, uterine corpus endometrial carcinoma, ovarian serous cystadenocarcinoma, cervical squamous cell carcinoma and adenocarcinoma, uterine carcinosarcoma, lung adenocarcinoma, lung squamous cell carcinoma, head & neck squamous cell carcinoma, prostate adenocarcinoma, invasive urothelial bladder cancer, liver hepatoceullular carcinoma, pancreatic ductal adenocarcinoma, or gallbladder adenocarcinoma, wherein at least 50% of the markers in a set each comprise one or more methylated cytosine residues of a CpG sequence, or the complement of one or more methylated cytosine residues of a CpG sequence selected from the list in FIG. 56.

51. The method of one of claims 41 through 49, wherein the disease state is a solid tissue cancer including colorectal adenocarcinoma, stomach adenocarcinoma, esophageal carcinoma, breast lobular and ductal carcinoma, uterine corpus endometrial carcinoma, ovarian serous cystadenocarcinoma, cervical squamous cell carcinoma and adenocarcinoma, uterine carcinosarcoma, lung adenocarcinoma, lung squamous cell carcinoma, head & neck squamous cell carcinoma, prostate adenocarcinoma, invasive urothelial bladder cancer, liver hepatoceullular carcinoma, pancreatic ductal adenocarcinoma, or gallbladder adenocarcinoma, wherein at least 50% of the markers in a set each comprise of one or more methylated residues of one or more chromosomal sub-regions selected from the list in FIG. 57.

52. The method of one of claims 41 through 49, wherein the disease state is a solid tissue cancer including colorectal adenocarcinoma, stomach adenocarcinoma, esophageal carcinoma, breast lobular and ductal carcinoma, uterine corpus endometrial carcinoma, ovarian serous cystadenocarcinoma, cervical squamous cell carcinoma and adenocarcinoma, uterine carcinosarcoma, lung adenocarcinoma, lung squamous cell carcinoma, head & neck squamous cell carcinoma, prostate adenocarcinoma, invasive urothelial bladder cancer, liver hepatoceullular carcinoma, pancreatic ductal adenocarcinoma, or gallbladder adenocarcinoma, wherein the one or more markers in a set comprise of one or more miRNA sequences (mir ID, Gene ID) selected from the group consisting of: hsa-mir-21, MIR21; hsa-mir-182, MIR182; hsa-mir-454, MIR454; hsa-mir-96, MIR96; hsa-mir-183, MIR183; hsa-mir-549, MIR549; hsa-mir-301^{a}, MIR301A; hsa-mir-548f-1, MIR548F1; hsa-mir-301b, MIR301B; hsa-mir-103-1, MIR1031; hsa-mir-18^{a}, MIR18A; hsa-mir-147b, MIR147B; hsa-mir-4326, MIR4326; and hsa-mir-573, MIR573, or one or more lncRNA or ncRNA sequences selected from the list in FIG. 53.

53. The method of one of claims 41 through 49, wherein the disease state is a solid tissue cancer including colorectal adenocarcinoma, stomach adenocarcinoma, esophageal carcinoma, breast lobular and ductal carcinoma, uterine corpus endometrial carcinoma, ovarian serous cystadenocarcinoma, cervical squamous cell carcinoma and adenocarcinoma, uterine carcinosarcoma, lung adenocarcinoma, lung squamous cell carcinoma, head & neck squamous cell carcinoma, prostate adenocarcinoma, invasive urothelial bladder cancer, liver hepatoceullular carcinoma, pancreatic ductal adenocarcinoma, or gallbladder adenocarcinoma, wherein the one or more markers in a set comprise of one or more Exon RNA sequences selected from the list in FIG. 54.

54. The method of one of claims 41 through 49, wherein the disease state is a solid tissue cancer including colorectal adenocarcinoma, stomach adenocarcinoma, esophageal carcinoma, breast lobular and ductal carcinoma, uterine corpus endometrial carcinoma, ovarian serous cystadenocarcinoma, cervical squamous cell carcinoma and adenocarcinoma, uterine carcinosarcoma, lung adenocarcinoma, lung squamous cell carcinoma, head & neck squamous cell carcinoma, prostate adenocarcinoma, invasive urothelial bladder cancer, liver hepatoceullular carcinoma, pancreatic ductal adenocarcinoma, or gallbladder adenocarcinoma, wherein the one or more markers in a set comprise of one or more mRNA sequences, protein expression levels, protein product concentrations, cytokines, or autoantibody to the protein product selected from the list in FIG. 55 or from the group consisting of (Protein name, UniProt ID): Uncharacterized protein C19orf48, Q6RUI8; Protein FAM72B, Q86X60; Protein FAM72D, Q6L9T8; Hydroxyacylglutathione hydrolase-like protein, Q6PII5; Putative methyltransferase NSUN5, Q96P11; RNA pseudouridylate synthase domain-containing protein 1, Q9UJJ7; Collagen triple helix repeat-containing protein 1, Q96CG8; Interleukin-11. P20809; Stromelysin-2, P09238; Matrix metalloproteinase-9, P14780, Podocan-like protein 1, Q6PEZ8; Putative peptide YY-2, Q9NRI6; Osteopontin, P10451; Sulfhydryl oxidase 2, Q6ZRP7; Glypican-2, Q8N158; Macrophage migration inhibitory factor, P14174; Peptidyl-prolyl cis-trans isomerase A, P62937; and Calreticulin, P27797.

55. The method of one of claims 41 through 49, wherein the disease state is a solid tissue cancer including colorectal adenocarcinoma, stomach adenocarcinoma, esophageal carcinoma, breast lobular and ductal carcinoma, uterine corpus endometrial carcinoma, ovarian serous cystadenocarcinoma, cervical squamous cell carcinoma and adenocarcinoma, uterine carcinosarcoma, lung adenocarcinoma, lung squamous cell carcinoma, head & neck squamous cell carcinoma, prostate adenocarcinoma, invasive urothelial bladder cancer, liver hepatoceullular carcinoma, pancreatic ductal adenocarcinoma, or gallbladder adenocarcinoma, wherein the one or more markers in a set comprise of one or more mutations, insertions, deletions, copy number changes, or expression changes in a gene selected from the group consisting of TP53 (tumor protein p53), TTN (titin), MUC16 (mucin 16), and KRAS (Ki-ras2 Kirsten rat sarcoma viral oncogene homolog).

56. The method of one of claims 41 through 49, wherein the disease state is colon adenocarcinoma, rectal adenocarcinoma, stomach adenocarcinoma, or esophageal carcinoma, wherein at least 50% of the markers in a set each comprise one or more methylated cytosine residues of a CpG sequence, or the complement of one or more methylated cytosine residues of a CpG sequence selected from the list in FIG. 44 or in FIG. 59.

57. The method of one of claims 41 through 49, wherein the disease state is colon adenocarcinoma, rectal adenocarcinoma, stomach adenocarcinoma, or esophageal carcinoma, wherein at least 50% of the markers in a set each comprise of one or more methylated residues of one or more chromosomal sub-regions selected from the list in FIG. 45 or in FIG. 60.

58. The method of one of claims 41 through 49, wherein the disease state is colon adenocarcinoma, rectal adenocarcinoma, stomach adenocarcinoma, or esophageal carcinoma, wherein the one or more markers in a set comprise of one or more miRNA sequences selected from the list in FIG. 39; hsa-mir-624, MIR624; or one or more lncRNA or ncRNA sequences selected from the list in FIG. 40 or the group consisting of [Gene ID, Coordinate (GRCh38)]: ENSEMBL ID: LINC01558, chr6:167784537-167796859, and ENSG00000146521.8.

59. The method of one of claims 41 through 49, wherein the disease state is colon adenocarcinoma, rectal adenocarcinoma, stomach adenocarcinoma, or esophageal carcinoma, wherein the one or more markers in a set comprise of one or more Exon RNA sequences selected from the list in FIG. 41 or in FIG. 58.

60. The method of one of claims 41 through 49, wherein the disease state is colon adenocarcinoma, rectal adenocarcinoma, stomach adenocarcinoma, or esophageal carcinoma, wherein the one or more markers in a set comprise of one or more mRNA sequences, protein expression levels, protein product concentrations, cytokines, or autoantibody to the protein product selected from the list in FIG. 42, FIG. 43, or from the group consisting of (Gene Symbol, Chromosome Band, Gene Title, UniProt ID): SELE, 1q22-q25, selectin E, P16581; OTUD4, 4q31.21, OTU domain containing 4, Q01804; BPI, 20q11.23, bactericidal/permeability-increasing protein, P17213; ASB4, 7q21-q22, ankyrin repeat and SOCS box containing 4, Q9Y574; C6orf123, 6q27, chromosome 6 open reading frame 123, Q9Y6Z2; KPNA3, 13q14.3, karyopherin alpha 3 (importin alpha 4), O00505; and NUP98, 11p15, nucleoporin 98 kDa, P52948; or (Protein name, UniProt ID) Bactericidal permeability-increasing protein (BPI) (CAP 57), P17213.

61. The method of one of claims 41 through 49, wherein the disease state is colon adenocarcinoma, rectal adenocarcinoma, stomach adenocarcinoma, or esophageal carcinoma, wherein the one or more markers in a set comprise of one or more mutations, insertions, deletions, copy number changes, or expression changes in a gene selected from the group consisting of APC (APC regulator of WNT signaling pathway), ATM (ATM serine/threonine kinase), CSMD1 (CUB and Sushi multiple domains 1), DNAH11 (dynein axonemal heavy chain 11), DST (dystonin), EP400 (E1A binding protein p400), FAT3 (FAT atypical cadherin 3), FAT4 (FAT atypical cadherin 4), FLG (filaggrin), GLI3 (GLI family zinc finger 3), KRAS (Ki-ras2 Kirsten rat sarcoma viral oncogene homolog), LRP1B (LDL receptor related protein 1B), MUC16 (mucin 16, cell surface associated), OBSCN (obscurin, cytoskeletal calmodulin and titin-interacting RhoGEF), PCLO (piccolo presynaptic cytomatrix protein), PIK3CA (phosphatidylinositol-4,5-bisphosphate 3-kinase catalytic subunit alpha), RYR2 (ryanodine receptor 2), SYNE1 (spectrin repeat containing nuclear envelope protein 1), TP53 (tumor protein p53), TTN (titin), and UNC13C (unc-13 homolog C).

62. The method of one of claims 41 through 49, wherein the disease state is breast lobular and ductal carcinoma, uterine corpus endometrial carcinoma, ovarian serous cystadenocarcinoma, cervical squamous cell carcinoma and adenocarcinoma, or uterine carcinosarcoma, wherein at least 50% of the markers in a set each comprise one or more methylated cytosine residues of a CpG sequence, or the complement of one or more methylated cytosine residues of a CpG sequence selected from the list in FIG. 61.

63. The method of one of claims 41 through 49, wherein the disease state is breast lobular and ductal carcinoma, uterine corpus endometrial carcinoma, ovarian serous cystadenocarcinoma, cervical squamous cell carcinoma and adenocarcinoma, or uterine carcinosarcoma, wherein at least 50% of the markers in a set each comprise of one or more methylated residues of one or more chromosomal sub-regions selected from the list in FIG. 62.

64. The method of one of claims 41 through 49, wherein the disease state is breast lobular and ductal carcinoma, uterine corpus endometrial carcinoma, ovarian serous cystadenocarcinoma, cervical squamous cell carcinoma and adenocarcinoma, or uterine carcinosarcoma, wherein the one or more markers in a set comprise of one or more miRNA sequences selected from the group consisting of (mir ID, Gene ID): hsa-mir-1265, MIR1265.

65. The method of one of claims 41 through 49, wherein the disease state is breast lobular and ductal carcinoma, uterine corpus endometrial carcinoma, ovarian serous cystadenocarcinoma, cervical squamous cell carcinoma and adenocarcinoma, or uterine carcinosarcoma, wherein the one or more markers in a set comprise of one or more Exon RNA sequences (Exon location, Gene) selected from the group consisting of: chr2:179209013-179209087:+, OSBPL6; chr2:179251788-179251866:+, OSBPL6; and chr2:179253736-179253880:+, OSBPL6.

66. The method of one of claims 41 through 49, wherein the disease state is breast lobular and ductal carcinoma, uterine corpus endometrial carcinoma, ovarian serous cystadenocarcinoma, cervical squamous cell carcinoma and adenocarcinoma, or uterine carcinosarcoma, wherein the one or more markers in a set comprise of one or more mRNA sequences, protein expression levels, protein product concentrations, cytokines, or autoantibody to the protein product selected from the group consisting of (Gene Symbol, Chromosome Band, Gene Title, UniProt ID): RSPO2, 8q23.1, R-spondin 2, Q6UXX9; KLC4, 6p21.1, kinesin light chain 4, Q9NSK0; and GLRX, 5q14, glutaredoxin (thioltransferase), P35754; or (Protein name, UniProt ID) R-spondin-2 (Roof plate-specific spondin-2) (hRspo2), Q6UXX9.

67. The method of one of claims 41 through 49, wherein the disease state is breast lobular and ductal carcinoma, uterine corpus endometrial carcinoma, ovarian serous cystadenocarcinoma, cervical squamous cell carcinoma and adenocarcinoma, or uterine carcinosarcoma, wherein the one or more markers in a set comprise of one or more mutations, insertions, deletions, copy number changes, or expression changes in a gene selected from the group consisting of PIK3CA (phosphatidylinositol-4,5-bisphosphate 3-kinase catalytic subunit alpha), and TTN (titin).

68. The method of one of claims 41 through 49, wherein the disease state is lung adenocarcinoma, lung squamous cell carcinoma, or head & neck squamous cell carcinoma, wherein at least 50% of the markers in a set each comprise one or more methylated cytosine residues of a CpG sequence, or the complement of one or more methylated cytosine residues of a CpG sequence selected from the list in FIG. 63.

69. The method of one of claims 41 through 49, wherein the disease state is lung adenocarcinoma, lung squamous cell carcinoma, or head & neck squamous cell carcinoma, wherein at least 50% of the markers in a set each comprise of one or more methylated residues of one or more chromosomal sub-regions selected from the list in FIG. 64.

70. The method of one of claims 41 through 49, wherein the disease state is lung adenocarcinoma, lung squamous cell carcinoma, or head & neck squamous cell carcinoma, wherein the one or more markers in a set comprise of one or more miRNA sequences selected from (mir ID, Gene ID): hsa-mir-28, MIR28.

71. The method of one of claims 41 through 49, wherein the disease state is lung adenocarcinoma, lung squamous cell carcinoma, or head & neck squamous cell carcinoma, wherein the one or more markers in a set comprise of one or more Exon RNA sequences (Exon location, Gene) selected from the group consisting of: chr2: chr1:93307721-93309752:−, FAM69A; chr1:93312740-93312916:−, FAM69A; chr1:93316405-93316512:−, FAM69A; chr1:93341853-93342152:−, FAM69A; chr1:93426933-93427079:−, FAM69A; chr7:40221554-40221627:+, C7orf10; chr7:40234539-40234659:+, C7orf10; chr8:22265823-22266009:+, SLC39A14; chr8:22272293-22272415:+, SLC39A14; chr14:39509936-39510091:−, SEC23A; and chr14:39511990-39512076:−, SEC23A.

72. The method of one of claims 41 through 49, wherein the disease state is lung adenocarcinoma, lung squamous cell carcinoma, or head & neck squamous cell carcinoma, wherein the one or more markers in a set comprise of one or more mRNA sequences, protein expression levels, protein product concentrations, cytokines, or autoantibody to the protein product selected from the group consisting of (Gene Symbol, Chromosome Band, Gene Title, UniProt ID): STRN3, 14q13-q21, striatin, calmodulin binding protein 3, Q13033; LRRC17, 7q22.1, leucine rich repeat containing 17, Q8N6Y2; FAM69A, 1p22, family with sequence similarity 69, member A, Q5T7M9; ATF2, 2q32, activating transcription factor 2, P15336; BHMT 5q14.1, betaine-homocysteine S-methyltransferase, Q93088; ODZ3/TENM3, 4q34.3-q35.1, teneurin transmembrane protein 3, Q9P273; and ZFHX4, 8q21.11, zinc finger homeobox 4, Q86UP3; or (Protein name, UniProt ID): Leucine-rich repeat-containing protein 17 (p37NB), Q8N6Y2.

73. The method of one of claims 41 through 49, wherein the disease state is lung adenocarcinoma, lung squamous cell carcinoma, or head & neck squamous cell carcinoma, wherein the one or more markers in a set comprise of one or more mutations, insertions, deletions, copy number changes, or expression changes in a gene selected from the group consisting of CSMD3 (CUB and Sushi multiple domains 3), DNAH5 (dynein axonemal heavy chain 5), FAT1 (FAT atypical cadherin 1), FLG (filaggrin), KRAS (Ki-ras2 Kirsten rat sarcoma viral oncogene homolog), LRP1B (LDL receptor related protein 1B), MUC16 (mucin 16, cell surface associated), PCLO (piccolo presynaptic cytomatrix protein), PKHD1L1 (PKHD1 like 1), RELN (reelin), RYR2 (ryanodine receptor 2), SI (sucrase-isomaltase), SYNE1 (spectrin repeat containing nuclear envelope protein 1), TP53 (tumor protein p53), TTN (titin), USH2A (usherin), and XIRP2 (xin actin binding repeat containing 2).

74. The method of one of claims 41 through 49, wherein the disease state is prostate adenocarcinoma or invasive urothelial bladder cancer, wherein at least 50% of the markers in a set each comprise one or more methylated cytosine residues of a CpG sequence, or the complement of one or more methylated cytosine residues of a CpG sequence selected from the list in FIG. 65.

75. The method of one of claims 41 through 49, wherein the disease state is prostate adenocarcinoma or invasive urothelial bladder cancer, wherein at least 50% of the markers in a set each comprise of one or more methylated residues of one or more chromosomal sub-regions selected from the list in FIG. 66.

76. The method of one of claims 41 through 49, wherein the disease state is prostate adenocarcinoma or invasive urothelial bladder cancer, wherein the one or more markers in a set comprise of one or more miRNA sequences selected from the group consisting of (mir ID, Gene ID): hsa-mir-491, MIR491; and hsa-mir-1468, MIR1468, or one or more lncRNA or ncRNA sequences selected from the group consisting of [Gene ID, Coordinate (GRCh38), ENSEMBL ID]: AC007383.3, chr2:206084605-206086564, ENSG00000227946.1; and LINC00324, chr17:8220642-8224043, ENSG00000178977.3.

77. The method of one of claims 41 through 49, wherein the disease state is prostate adenocarcinoma or invasive urothelial bladder cancer, wherein the one or more markers in a set comprise of one or more Exon RNA sequences selected from (Exon location, Gene); chr21:45555942-45556055:+, C21orf33.

78. The method of one of claims 41 through 49, wherein the disease state is prostate adenocarcinoma or invasive urothelial bladder cancer, wherein the one or more markers in a set comprise of one or more mRNA sequences, protein expression levels, protein product concentrations, cytokines, or autoantibody to the protein product selected from (Gene Symbol, Chromosome Band, Gene Title, UniProt ID): PMM1, 22q13, phosphomannomutase 1, Q92871.

79. The method of one of claims 41 through 49, wherein the disease state is prostate adenocarcinoma or invasive urothelial bladder cancer, wherein the one or more markers in a set comprise of one or more mutations, insertions, deletions, copy number changes, or expression changes in a gene selected from the group consisting of BAGE2 (BAGE family member 2), DNM1P47 (dynamin 1 pseudogene 47), FRG1BP (region gene 1 family member B, pseudogene), KRAS (Ki-ras2 Kirsten rat sarcoma viral oncogene homolog), RP11-156P1.3, TTN (titin), and TUBB8P7 (tubulin beta 8 class VIII pseudogene 7).

80. The method of one of claims 41 through 49, wherein the disease state is liver hepatoceullular carcinoma, pancreatic ductal adenocarcinoma, or gallbladder adenocarcinoma, wherein at least 50% of the markers in a set each comprise one or more methylated cytosine residues of a CpG sequence, or the complement of one or more methylated cytosine residues of a CpG sequence selected from the list in FIG. 70.

81. The method of one of claims 41 through 49, wherein the disease state is liver hepatoceullular carcinoma, pancreatic ductal adenocarcinoma, or gallbladder adenocarcinoma, wherein at least 50% of the markers in a set each comprise of one or more methylated residues of one or more chromosomal sub-regions selected from the list in FIG. 71.

82. The method of one of claims 41 through 49, wherein the disease state is liver hepatoceullular carcinoma, pancreatic ductal adenocarcinoma, or gallbladder adenocarcinoma, wherein the one or more markers in a set comprise of one or more miRNA sequences selected from (mir ID, Gene ID): hsa-mir-132, MIR132, or one or more lncRNA or ncRNA sequences selected from the list in FIG. 67.

83. The method of one of claims 41 through 49, wherein the disease state is liver hepatoceullular carcinoma, pancreatic ductal adenocarcinoma, or gallbladder adenocarcinoma, wherein the one or more markers in a set comprise of one or more Exon RNA sequences selected from the list in FIG. 68.

84. The method of one of claims 41 through 49, wherein the disease state is liver hepatoceullular carcinoma, pancreatic ductal adenocarcinoma, or gallbladder adenocarcinoma, wherein the one or more markers in a set comprise of one or more mRNA sequences, protein expression levels, protein product concentrations, cytokines, or autoantibody to the protein product selected from the list in FIG. 69 or from the group consisting of (Protein name, UniProt ID); Gelsolin (AGEL) (Actin-depolymerizing factor) (ADF) (Brevin), P06396; Pro-neuregulin-2, O14511; CD59 glycoprotein (1F5 antigen) (20 kDa homologous restriction factor) (HRF-20) (HRF20) (MAC-inhibitory protein) (MAC-IP) (MEM43 antigen) (Membrane attack complex inhibition factor) (MACIF) (Membrane inhibitor of reactive lysis) (MIRL) (Protectin) (CD antigen CD59), P13987; and Divergent protein kinase domain 2B (Deleted in autism-related protein 1), Q9H7Y0.

85. The method of one of claims 41 through 49, wherein the disease state is liver hepatoceullular carcinoma, pancreatic ductal adenocarcinoma, or gallbladder adenocarcinoma, wherein the one or more markers in a set comprise of one or more mutations, insertions, deletions, copy number changes, or expression changes in a gene selected from the group consisting of KRAS (Ki-ras2 Kirsten rat sarcoma viral oncogene homolog), MUC16 (mucin 16, cell surface associated), MUC4 (mucin 4, cell surface associated), TP53 (tumor protein p53), and TTN (titin).
